(19) United States
(12) Patent Application Publication
(10) Pub. No.: US 2023/0193268 A1
(43) Pub. Date: Jun. 22, 2023

(54) APOLIPOPROTEIN E (APOE) iRNA AGENT COMPOSITIONS AND METHODS OF USE THEREOF

(71) Applicant: Alnylam Pharmaceuticals, Inc., Cambridge, MA (US)

(72) Inventors: Bret Lee Bostwick, Cambridge, MA (US); Haiyan Peng, Medford, MA (US); James D. McIninch, Burlington, MA (US); Adam Castoreno, Framingham, MA (US); Mark K. Schlegel, Boston, MA (US)

(21) Appl. No.: 17/974,596

(22) Filed: Oct. 27, 2022

Related U.S. Application Data
(63) Continuation of application No. PCT/US2021/029081, filed on Apr. 26, 2021.
(60) Provisional application No. 63/015,867, filed on Apr. 27, 2020.

(51) Int. Cl. C12N 15/113; A61P 25/28

(52) U.S. Cl. CPC C12N 15/113; A61P 25/28; C12N 2310/14; C12N 2310/315; C12N 2310/3515; C12N 2320/35

(57) ABSTRACT

The disclosure relates to double stranded ribonucleic acid (dsRNAi) agents and compositions targeting an APOE gene, as well as methods of inhibiting expression of an APOE gene and methods of treating subjects having an APOE-associated neurodegenerative disease or disorder, e.g., Alzheimer's disease and Parkinson's disease, using such dsRNAi agents and compositions.

### RELATED APPLICATIONS

[0001] This application is a 35 § U.S.C. 111(a) continuation application which claims the benefit of priority to PCT/US2021/029081, filed on Apr. 26, 2021, which, in turn, claims the benefit of priority to U.S. Provisional Application No. 63/015,867, filed on Apr. 27, 2020. The entire contents of each of the foregoing applications are incorporated herein by reference.

### SEQUENCE LISTING

[0002] The instant application contains a Sequence Listing which has been submitted electronically in XML file format and is hereby incorporated by reference in its entirety. Said XML copy, created on Jan. 23, 2023, is named 121301-11202_SL.xml and is 4,471,402 bytes in size.

### BACKGROUND OF THE INVENTION

[0003] The apolipoprotein E gene encodes the Apolipoprotein E (APOE) protein, a glycoprotein that, following cleavage of an 18 amino acid signal peptide, is composed of 299 amino acids. There are three common isoforms of APOE, APOE2, APOE3, and APOE4, encoded by three corresponding alleles. The three APOE isoforms, ApoE ε2 (APOE2), ApoE ε3 (APOE3), ApoE ε4 (APOE4), differ from one another only at amino acid positions 112 and 158; APOE2 has a Cys112 and a Cys158, APOE3 has a Cys112 and an Arg 158, and APOE4 has an Arg112 and an Arg158. APOE is widely expressed, but is primarily expressed peripherally in liver hepatocytes and in glial cells in the central nervous system (CNS).

[0004] In the periphery, APOE functions in lipid homeostasis. These lipoprotein particles cannot cross the blood-brain barrier; studies have shown that apoE-containing particles released by astrocytes and microglia are the main sources of brain apoE (Bjorkhem I, et al. (1998) J Lipid Research 39(8):1594-1600; Pitas R E, et al. (1987) Biochimica Biophysica Acta. 13; 917(1):148-161; Krasemann S, et al. (2017) Immunity. 47(3):566-581.e9. doi:10.1016/j.immuni.2017.08.008). In the brain, APOE modulates multiple pathways including lipid transport, synaptic integrity and plasticity, glucose metabolism, neuroinflammation, and cerebrovascular integrity. For example, once APOE is secreted from cells, several transporters (e.g., ATB-binding cssestte transporters) transfer cholesterol and phospholipids to nascent APOE to form lipoprotein particles which APOE subsequently distributes to neurons through binding to APOE receptors, such as LDL receptor (LDLR) family members. Furthermore, it has been observed that the serum APOE phenotype but not the cerebrospinal fluid (CSF) ApoE phenotype of a recipient completely converted to that of donor following liver transplantation. In addition, astrocytes produce APOE in high-density lipoprotein (HDL)-like particles that have distinct properties from APOE derived from other sources (see, e.g., Morikawa, et al., Neurobiol Dis. June-July 2005; 19(1-2): 66-76). Therefore, the APOE in CSF cannot be derived from the plasma pool and therefore must be synthesized locally (Linton M F, et al. (1991) J Clin Invest. 88(1):270-281. doi:10.1172/JCI115288).

[0005] Polymorphism in the APOE gene has been associated with multiple proteinopathies. The best established link between APOE polymorphism and disease is between APOE genotype and Alzheimer's disease (AD) which has been shown to be a major risk determinant of late-onset Alzheimer's disease, the symptoms of which develop after age 65. Additionally, recent work from Haltzman lab described that possession of the ε4 allele significantly accelerated disease progression (p=0.02), with one ε4 allele increasing progression rate by 14% and two ε4 alleles increasing the rate by 23% compared to non-carriers (Holtzman, et al. (2017) Nature 549:523). AD is the leading cause of dementia in elderly individuals and its pathological hallmarks include the deposition of extracellular amyloid-β (Aβ) aggregates as amyloid plaques and intracellular hyperphosphorylated tau aggregates as neurofibrillary tangles along with neuronal loss and glial activation. As individuals with late-onset AD account for 95% or more of the total AD population, various efforts to elucidate the role of APOE in AD are ongoing.

[0006] More specifically, it has been shown that subjects having one copy of APOE4 have a greater than three-fold risk of developing AD and subjects having two copies of APOE4 have a greater than 12-fold increased risk of developing AD, while two copies of APOE2 are protective in subjects from AD development (Reiman E M, et al. (2020) Nature Communications 11 (1); 667). In addition, there have been three APOE knockout human cases reported and none of these subjects experienced dementia at the time of hospital visit (age 40-60) (Ghiselli, et al. (1981) Science 214(4526):1239; Mak, et al. (2014) JAMA Neurol 71:1228; and Lohse, et al. (1992) J Lipid Res. (11):1583). In one of the three cases (40 years old male), MRI and Cerebral Spinal Fluid (CSF) biomarker tests demonstrated no signs of neurodegenerations with intact brain structure and normal range of Tau and p-Tau levels. Furthermore, a recent case study, has shown that the Christchurch mutation in ApoE3 may be protective again presenilin 1 driven dementia as evident by preserved cognitive function and limited Taupathy by PET. The presence of the Christchurch mutation led to loss of function of ApoE3 binding to HSPGs and LDL receptors and the patient has hyperlipoproteinemia type III but no cardiovascular disease (Arboleda-Velasquez, et al. (2019) Nature Medicien 25:1680).

[0007] It has also been demonstrated in ApoE inducible amyloid mouse models that increased expression of ApoE4 accelerates amyloid accumulation and neuritic dystrophy (Liu, et al. (2017) Neuron 96:1024) and Huynh, et al. (Neuron (2017) 96:1013) and that antisense inhibition of APOE4 is protective in transgenic amyloid precursor protein (APP)/presenillin 1 (PS1-21) mice. In addition, it has been shown that deletion of ApoE4 in a tauopathy mouse model was protective of neurodegeneration (Holtzman, et al. (2017) Nature 549:523) and that reintroduction of APOE4 expression in human neurons derived from induced pluripotent stem cells that expressed APOE4 but were made APOE null results in a gain of toxic effect from APOE4 (Wang, et al. (2018) Nat Medicine 24:647). Furthermore, it has been shown that restricting expression of APOE4 to the liver of mice can still have an effect on cognitive abilities and can compromise the blood brain barrier and increase neuroinflammation (alzforum.org/news/research-news/apoe-has-hand-Alzheimer'ss-beyond-av-beyond-brain).

[0008] Currently, there are no cures or preventative treatments for subjects having an APOE-associated neurodegenerative disease, such as AD, and supportive and symptomatic management is the mainstay of treatment. Therefore, there is a need in the art for compositions and methods for the treatment of subjects that have or are at risk of developing a neurodegenerative disease.

### BRIEF SUMMARY OF THE INVENTION

[0009] The present disclosure provides RNAi agent compositions which effect the RNA-induced silencing complex (RISC)-mediated cleavage of RNA transcripts of an apolipoprotein E (APOE) gene. The APOE gene may be within a cell, e.g., a cell within a subject, such as a human. The present disclosure also provides methods of using the RNAi agent compositions of the disclosure for inhibiting the expression of an APOE gene or for treating a subject who would benefit from inhibiting or reducing the expression of an APOE gene, e.g., a pathogenic APOE allele, i.e., APOE4, e.g., a subject suffering or prone to suffering from an APOE-associated neurodegenerative disease, such as an amyloid-p-mediated disease or a tau-mediated disease. In particular, the RNAi agent compositions herein are capable of affecting the unique APOE expression by astrocytes within the CNS for the treatment of APOE-associated neurodegenerative disease.

[0010] Accordingly, in one aspect, the instant disclosure provides a double stranded ribonucleic acid (RNAi) agent for inhibiting expression of an apolipoprotein E (APOE) gene, where the RNAi agent includes a sense strand and an antisense strand, and where the antisense strand includes a region of complementarity which includes at least 15 contiguous nucleotides differing by no more than 3 nucleotides (i.e., differing by 3, 2, 1, or 0 nucleotides) from any one of the antisense sequences listed in any one of Tables 2-5 and 7-10. In certain embodiments, the antisense strand includes a region of complementarity which includes at least 15 contiguous nucleotides of any one of the antisense sequences listed in any one of Tables 2-5 and 7-10. In certain embodiments, the antisense strand includes a region of complementarity which includes at least 15 contiguous nucleotides of any one of the antisense sequences listed in any one of Tables 7 and 8. In certain embodiments, the antisense strand includes a region of complementarity which includes at least 15 contiguous nucleotides of any one of the antisense sequences listed in any one of Tables 9 and 10. In certain embodiments, the antisense strand includes a region of complementarity which includes at least 19 contiguous nucleotides differing by no more than 3 nucleotides (i.e., differing by 3, 2, 1, or 0 nucleotides) from any one of the antisense sequences listed in any one of Tables 2-5 and 7-10. In certain embodiments, the antisense strand includes a region of complementarity which includes at least 19 contiguous nucleotide (i.e., differing by 3, 2, 1, or 0 nucleotides) of any one of the antisense sequences listed in any one of Tables 7 and 8. In certain embodiments, the antisense strand includes a region of complementarity which includes at least 19 contiguous nucleotide (i.e., differing by 3, 2, 1, or 0 nucleotides) of any one of the antisense sequences listed in any one of Tables 9 and 10. In certain embodiments, the antisense strand includes a region of complementarity which includes at least 19 contiguous nucleotides of any one of the antisense sequences listed in any one of Tables 2-5 and 7-10. In certain embodiments, the antisense strand includes a region of complementarity which includes at least 19 contiguous nucleotides of any one of the antisense sequences listed in any one of Tables 7 and 8. In certain embodiments, the antisense strand includes a region of complementarity which includes at least 19 contiguous nucleotides of any one of the antisense sequences listed in any one of Tables 9 and 10. In certain embodiments, thymine-to-uracil or uracil-to-thymine differences between aligned (compared) sequences are not counted as nucleotides that differ between the aligned (compared) sequences.

[0011] In some embodiments, the agents include one or more lipophilic moieties conjugated to one or more internal nucleotide positions, optionally via a linker or carrier.

[0012] In other embodiments, the agent further comprises a targeting ligand that targets a liver tissue, e.g., one or more GalNAc derivatives, optionally conjugated to the double stranded RNAi agent via a linker or carrier.

[0013] In yet other embodiments, the agents further comprise one or more lipophilic moieties conjugated to one or more internal nucleotide positions, optionally via a linker or carrier and a targeting ligand that targets a liver tissue, e.g., one or more GalNAc derivatives, optionally conjugated to the double stranded RNAi agent via a linker or carrier.

[0014] In certain embodiments, the double stranded RNAi agents inhibit the expression of an APOE2 allele, an APOE3 allele, and an APOE4 allele. In other embodiments, the double stranded RNAi agents inhibit the expression of APOE4 but do not substantially inhibit the expression of APOE2 and APOE3, e.g., the expression of APOE2 and APOE3 is inhibited by no more than about 10%.

[0015] Another aspect of the instant disclosure provides a double stranded RNAi agent for inhibiting expression of a apolipoprotein E (APOE) gene, where the dsRNA agent includes a sense strand and an antisense strand, where the sense strand includes at least 15 contiguous nucleotides differing by no more than 3 nucleotides (i.e., differing by 3, 2, 1, or 0 nucleotides) from any one of the sense strand sequences presented in Tables 2-5 and 7-10; and where the antisense strand includes at least 15 contiguous nucleotides differing by no more than 3 nucleotides from any one of antisense strand nucleotide sequences presented in Tables 2-5 and 7-10. In certain embodiments, the sense strand includes at least 15 contiguous nucleotides of any one of the sense strand sequences presented in Tables 2-5 and 7-10; and where the antisense strand includes at least 15 contiguous nucleotides of any one of antisense strand nucleotide sequences presented in Tables 2-5 and 7-10. In certain embodiments, the sense strand includes at least 15 contiguous nucleotides of any one of the sense strand sequences presented in Tables 7 and 8; and where the antisense strand includes at least 15 contiguous nucleotides of any one of antisense strand nucleotide sequences presented in Tables 7 and 8. In certain embodiments, the sense strand includes at least 15 contiguous nucleotides of any one of the sense strand sequences presented in Tables 9 and 10; and where the antisense strand includes at least 15 contiguous nucleotides of any one of antisense strand nucleotide sequences presented in Tables 9 and 10. In certain embodiments, the sense strand includes at least 19 contiguous nucleotides (i.e., differing by 3, 2, 1, or 0 nucleotides) of any one of the sense strand sequences presented in Tables 2-5 and 7-10; and where the antisense strand includes at least 19 contiguous nucleotides of any one of antisense strand nucleotide sequences presented in Tables 2-5 and 7-10 (i.e., differing by 3, 2, 1, or 0 nucleotides) from any one of antisense strand nucleotide sequences presented in Tables 2-5 and 7-10. In certain embodiments, the sense strand includes at least 19 contiguous nucleotides (i.e., differing by 3, 2, 1, or 0 nucleotides) of any one of the sense strand sequences presented in Tables 7 and 8; and where the antisense strand includes at least 19 contiguous nucleotides (i.e., differing by 3, 2, 1, or 0 nucleotides) of any one of antisense strand nucleotide sequences presented in Tables 7 and 8. In certain embodiments, the sense strand includes at least 19 contiguous nucleotides (i.e., differing by 3, 2, 1, or 0 nucleotides) of any one of the sense strand sequences presented in Tables 9 and 10; and where the antisense strand includes at least 19 contiguous nucleotides (i.e., differing by 3, 2, 1, or 0 nucleotides) of any one of antisense strand nucleotide sequences presented in Tables 9 and 10.

[0016] In some embodiments, the agents include one or more lipophilic moieties conjugated to one or more internal nucleotide positions, optionally via a linker or carrier.

[0017] In other embodiments, the agent further comprises a targeting ligand that targets a liver tissue, e.g., one or more GalNAc derivatives, optionally conjugated to the double stranded RNAi agent via a linker or carrier.

[0018] In yet other embodiments, the agents further comprise one or more lipophilic moieties conjugated to one or more internal nucleotide positions, optionally via a linker or carrier and a targeting ligand that targets a liver tissue, e.g., one or more GalNAc derivatives, optionally conjugated to the double stranded RNAi agent via a linker or carrier.

[0019] In certain embodiments, the double stranded RNAi agents inhibit the expression of an APOE2 allele, an APOE3 allele, and an APOE4 allele. In other embodiments, the double stranded RNAi agents inhibit the expression of APOE4 but do not substantially inhibit the expression of APOE2 and APOE3, e.g., the expression of APOE2 and APOE3 is inhibited by no more than about 10%.

[0020] An additional aspect of the disclosure provides a double stranded RNAi agent for inhibiting expression of an apolipoprotein E (APOE) gene, where the dsRNA agent includes a sense strand and an antisense strand, where the sense strand includes at least 15 contiguous nucleotides differing by no more than 3 nucleotides (i.e., differing by 3, 2, 1, or 0 nucleotides) from any one of the nucleotide sequences of SEQ ID NOs: 1, 3, 5, 7, or 9, or a nucleotide sequence having at least 90% nucleotide sequence identity, e.g. 90, 91, 92, 93, 94, 95, 96, 97, 98, 99 or 100% identity, to the entire nucleotide sequence of any one of SEQ ID NOs: 1, 3, 5, 7, or 9, where a substitution of a uracil for any thymine of SEQ ID NOs: 1, 3, 5, 7, and 9 (when comparing aligned sequences) does not count as a difference that contributes to the differing by no more than 3 nucleotides (i.e., differing by 3, 2, 1, or 0 nucleotides) from any one of the nucleotide sequences of SEQ ID NOs: 1, 3, 5, 7, and 9 or the nucleotide sequence having at least 90% nucleotide sequence identity, e.g. 90, 91, 92, 93, 94, 95, 96, 97, 98, 99 or 100% identity, to the entire nucleotide sequence of any one of SEQ ID NOs: 1, 3, 5, 7, or 9; and where the antisense strand includes at least 15 contiguous nucleotides differing by no more than 3 nucleotides from any one of the nucleotide sequences of SEQ ID NOs: 2, 4, 6, 8, or 10 or a nucleotide sequence having at least 90% nucleotide sequence identity, e.g. 90, 91, 92, 93, 94, 95, 96, 97, 98, 99 or 100% identity, to the entire nucleotide sequence of any one of SEQ ID NOs: 2, 4, 6, 8, or 10, where a substitution of a uracil for any thymine of SEQ ID NOs: 2, 4, 6, 8, and 10, (when comparing aligned sequences) does not count as a difference that contributes to the differing by no more than 3 nucleotides from any one of the nucleotide sequences of SEQ ID NOs: 2, 4, 6, 8, and 10, or the nucleotide sequence having at least 90% nucleotide sequence identity, e.g. 90, 91, 92, 93, 94, 95, 96, 97, 98, 99 or 100% identity, to the entire nucleotide sequence of any one of SEQ ID NOs: 2, 4, 6, 8, or 10, where at least one of the sense strand and the antisense strand includes one or more lipophilic moieties conjugated to one or more internal nucleotide positions, optionally via a linker or carrier.

[0021] In one embodiment, the double stranded RNAi agent targeted to APOE comprises a sense strand which includes at least 15 contiguous nucleotides differing by no more than 3 nucleotides (i.e., differing by 3, 2, 1, or 0 nucleotides) from the nucleotide sequence of the sense strand nucleotide sequence of a duplex in Tables 2-5 and 7-10. In one embodiment, the double stranded RNAi agent targeted to APOE comprises a sense strand which includes at least 15 contiguous nucleotides differing by no more than 3 nucleotides (i.e., differing by 3, 2, 1, or 0 nucleotides) from the nucleotide sequence of the sense strand nucleotide sequence of a duplex in Tables 7 and 8. In one embodiment, the double stranded RNAi agent targeted to APOE comprises a sense strand which includes at least 15 contiguous nucleotides differing by no more than 3 nucleotides (i.e., differing by 3, 2, 1, or 0 nucleotides) from the nucleotide sequence of the sense strand nucleotide sequence of a duplex in Tables 9 and 10.

[0022] In one embodiment, the double stranded RNAi agent targeted to APOE comprises an antisense strand which includes at least 15 contiguous nucleotides differing by no more than 3 nucleotides (i.e., differing by 3, 2, 1, or 0 nucleotides) from the antisense nucleotide sequence of any one of the duplexes in one of Tables 2-5 and 7-10. In one embodiment, the double stranded RNAi agent targeted to APOE comprises an antisense strand which includes at least 15 contiguous nucleotides differing by no more than 3 nucleotides (i.e., differing by 3, 2, 1, or 0 nucleotides) from the antisense nucleotide sequence of duplex in one of Tables 7 and 8. In one embodiment, the double stranded RNAi agent targeted to APOE comprises an antisense strand which includes at least 15 contiguous nucleotides differing by no more than 3 nucleotides (i.e., differing by 3, 2, 1, or 0 nucleotides) from the antisense nucleotide sequence of duplex in one of Tables 9 and 10.

[0023] In one embodiment, the double stranded RNAi agent targeted to APOE comprises a sense strand which includes at least 15 contiguous nucleotides differing by no more than 3 nucleotides (i.e., differing by 3, 2, 1, or 0 nucleotides) from any one of the nucleotide sequences of nucleotides 50-113, 59-97, 59-90, 107-177, 107-153, 124-153, 198-240, 203-240, 209-240, 283-378, 283-312, 307-378, 322-369, 330-357, 394-419, 568-600, 568-594, 841-879, 900-926, 997-1055, 1002-1044, 1014-1044, 1019-1044, 1120-1166, 1130-1166, 1130-1155 of SEQ ID NO: 1, and the antisense strand comprises at least 15 contiguous nucleotides from the corresponding nucleotide sequence of SEQ ID NO: 2.

[0024] In one embodiment, the double stranded RNAi agent targeted to APOE comprises a sense strand which includes at least 15 contiguous nucleotides differing by no more than 3 nucleotides (i.e., differing by 3, 2, 1, or 0 nucleotides) from any one of the nucleotide sequences of nucleotides 59-90, 330-357, 568-594, 1019-1044, 1130-1155 of SEQ ID NO: 1, and the antisense strand comprises at least 15 contiguous nucleotides from the corresponding nucleotide sequence of SEQ ID NO: 2.

[0025] In one embodiment, the double stranded RNAi agent targeted to APOE comprises a sense strand which includes at least 15 contiguous nucleotides differing by no more than 3 nucleotides (i.e., differing by 3, 2, 1, or 0 nucleotides) from any one of the nucleotide sequences of nucleotides 57-79, 62-84, 75-97, 86-108, 207-229, 213-235, 218-240, 898-920, 1128-1150, 637-659 of SEQ ID NO: 1, and the antisense strand comprises at least 15 contiguous nucleotides from the corresponding nucleotide sequence of SEQ ID NO: 2.

[0026] In another embodiment, the double stranded RNAi agent targeted to APOE comprises a sense strand which includes at least 15 contiguous nucleotides differing by no more than 3 nucleotides (i.e., differing by 3, 2, 1, or 0 nucleotides) from any one of the nucleotide sequences of nucleotides 57-79, 62-84, 207-229, 1128-1150 of SEQ ID NO: 1, and the antisense strand comprises at least 15 contiguous nucleotides from the corresponding nucleotide sequence of SEQ ID NO: 2.

[0027] In one embodiment, the double stranded RNAi agent targeted to APOE comprises an antisense strand which includes at least 15 contiguous nucleotides differing by no more than 3 nucleotides (i.e., differing by 3, 2, 1, or 0 nucleotides) from any one of the antisense strand nucleotide sequences of a duplex selected from the group consisting of AD-1204704, AD-1204705, AD-1204705, AD-1204706 AD-1204707, AD-1204708, AD-1204709, AD-1204710, AD-1204711, AD-1204712, and AD-1204713.

[0028] In one embodiment, the double stranded RNAi agent targeted to APOE comprises an antisense strand which includes at least 15 contiguous nucleotides differing by no more than 3 nucleotides (i.e., differing by 3, 2, 1, or 0 nucleotides) from any one of the antisense strand nucleotide sequences of a duplex selected from the group consisting of AD-1204704, AD-1204705, AD-1204708, and AD-1204712.

[0029] In some embodiments, the agent further comprises a targeting ligand that targets a liver tissue, e.g., one or more GalNAc derivatives, optionally conjugated to the double stranded RNAi agent via a linker or carrier.

[0030] In certain embodiments of the invention, the double stranded RNAi agents inhibit the expression of an APOE2 allele, an APOE3 allele, and an APOE4 allele. In other embodiments, the double stranded RNAi agents inhibit the expression of APOE4 but do not substantially inhibit the expression of APOE2 and APOE3, e.g., the expression of APOE2 and APOE3 is inhibited by no more than about 10%.

[0031] Optionally, the double stranded RNAi agent includes at least one modified nucleotide.

[0032] In certain embodiments, the lipophilicity of the lipophilic moiety, measured by log K_{ow}, exceeds 0.

[0033] In some embodiments, the hydrophobicity of the double-stranded RNAi agent, measured by the unbound fraction in a plasma protein binding assay of the double-stranded RNAi agent, exceeds 0.2. In a related embodiment, the plasma protein binding assay is an electrophoretic mobility shift assay using human serum albumin protein.

[0034] In certain embodiments, substantially of the nucleotides of the sense strand are modified nucleotides. Optionally, all of the nucleotides of the sense strand are modified nucleotides.

[0035] In some embodiments, substantially all of the nucleotides of the antisense strand are modified nucleotides. Optionally, all of the nucleotides of the antisense strand are modified nucleotides.

[0036] Optionally, all of the nucleotides of the sense strand and all of the nucleotides of the antisense strand are modified nucleotides.

[0037] In one embodiment, at least one of the modified nucleotides is a deoxy-nucleotide, a 3′-terminal deoxy-thymidine (dT) nucleotide, a 2′-O-methyl modified nucleotide, a 2′-fluoro modified nucleotide, a 2′-deoxy-modified nucleotide, a locked nucleotide, an unlocked nucleotide, a conformationally restricted nucleotide, a constrained ethyl nucleotide, an abasic nucleotide, a 2′-amino-modified nucleotide, a 2′-O-allyl-modified nucleotide, 2′-C-alkyl-modified nucleotide, 2′-hydroxyl-modified nucleotide, a 2′-methoxyethyl modified nucleotide, a 2′-O-alkyl-modified nucleotide, a morpholino nucleotide, a phosphoramidate, a non-natural base comprising nucleotide, a tetrahydropyran modified nucleotide, a 1,5-anhydrohexitol modified nucleotide, a cyclohexenyl modified nucleotide, a nucleotide comprising a 5′-phosphorothioate group, a nucleotide comprising a 5′-methylphosphonate group, a nucleotide comprising a 5′ phosphate or 5′ phosphate mimic, a nucleotide comprising vinyl phosphonate, a nucleotide comprising adenosine-glycol nucleic acid (GNA), a nucleotide comprising thymidine-glycol nucleic acid (GNA) S-Isomer, a nucleotide comprising 2-hydroxymethyl-tetrahydrofurane-5-phosphate, a nucleotide comprising 2′-deoxythymidine-3′phosphate, a nucleotide comprising 2′-deoxyguanosine-3′-phosphate, or a terminal nucleotide linked to a cholesteryl derivative or a dodecanoic acid bisdecylamide group.

[0038] In a related embodiment, the modified nucleotide is a 2′-deoxy-2′-fluoro modified nucleotide, a 2′-deoxy-modified nucleotide, 3′-terminal deoxy-thymidine nucleotides (dT), a locked nucleotide, an abasic nucleotide, a 2′-amino-modified nucleotide, a 2′-alkyl-modified nucleotide, a morpholino nucleotide, a phosphoramidate, or a non-natural base comprising nucleotide.

[0039] In one embodiment, the modified nucleotide includes a short sequence of 3′-terminal deoxy-thymidine nucleotides (dT).

[0040] In another embodiment, the modifications on the nucleotides are 2′-O-methyl, 2′fluoro and GNA modifications.

[0041] In an additional embodiment, the double stranded RNAi agent includes at least one phosphorothioate internucleotide linkage. Optionally, the double stranded RNAi agent includes 6-8 (e.g., 6, 7, or 8) phosphorothioate internucleotide linkages.

[0042] In certain embodiments, the region of complementarity is at least 17 nucleotides in length. Optionally, the region of complementarity is 19-23 nucleotides in length. Optionally, the region of complementarity is 19 nucleotides in length.

[0043] In one embodiment, each strand is no more than 30 nucleotides in length.

[0044] In another embodiment, at least one strand includes a 3′ overhang of at least 1 nucleotide. Optionally, at least one strand includes a 3′ overhang of at least 2 nucleotides.

[0045] In certain embodiments, the double stranded RNAi agent further includes a lipophilic ligand, e.g., a C16 ligand, conjugated to the 3′ end of the sense strand through a monovalent or branched bivalent or trivalent linker. In certain embodiments, the double stranded RNAi agent further includes a lipophilic ligand, e.g., a C16 ligand, conjugated to an internal nucleotide positon, e.g., through a monovalent or branched bivalent or trivalent linker.

[0046] In one embodiment, the ligand is

[chemical structure]

where B is a nucleotide base or a nucleotide base analog, optionally where B is adenine, guanine, cytosine, thymine or uracil.

[0047] In other embodiments, the agent further comprises a targeting ligand that targets a liver tissue, e.g., one or more GalNAc derivatives, optionally conjugated to the double stranded RNAi agent via a linker or carrier.

[0048] In yet other embodiments, the agents further comprise a lipophilic ligand, e.g., a C16 ligand, conjugated to an internal nucleotide position, e.g., through a monovalent or branched bivalent or trivalent linker, and a targeting ligand that targets a liver tissue, e.g., one or more GalNAc derivatives conjugated to the 3′ end of the sense strand through a monovalent or branched bivalent or trivalent linker.

[0049] In another embodiment, the region of complementarity to APOE includes any one of the antisense sequences in any one of Tables 2-5 and 7-10. In certain embodiments, the region of complementarity to APOE includes any one of the antisense sequences in any one of Tables 7 and 8. In certain embodiments, the region of complementarity to APOE includes any one of the antisense sequences in any one of Tables 9 and 10.

[0050] In an additional embodiment, the region of complementarity to APOE is that of any one of the antisense sequences in any one of Tables 2-5 and 7-10. In certain embodiments, the region of complementarity to APOE is that of any one of the antisense sequences in any one of Tables 7 and 8. In some embodiments, the internal nucleotide positions include all positions except the terminal two positions from each end of the strand. In certain embodiments, the region of complementarity to APOE is that of any one of the antisense sequences in any one of Tables 9 and 10. In some embodiments, the internal nucleotide positions include all positions except the terminal two positions from each end of the strand.

[0051] In a related embodiment, the internal positions include all positions except terminal three positions from each end of the strand. Optionally, the internal positions exclude the cleavage site region of the sense strand.

[0052] In some embodiments, the internal positions exclude positions 9-12, counting from the 5′-end of the sense strand. In certain embodiments, the sense strand is 21 nucleotides in length.

[0053] In other embodiments, the internal positions exclude positions 11-13, counting from the 3′-end of the sense strand. Optionally, the internal positions exclude the cleavage site region of the antisense strand. In certain embodiments, the sense strand is 21 nucleotides in length.

[0054] In some embodiments, the internal positions exclude positions 12-14, counting from the 5′-end of the antisense strand. In certain embodiments, the antisense strand is 23 nucleotides in length.

[0055] In another embodiment, the internal positions excluding positions 11-13 on the sense strand, counting from the 3′-end, and positions 12-14 on the antisense strand, counting from the 5′-end. In certain embodiments, the sense strand is 21 nucleotides in length and the antisense strand is 23 nucleotides in length.

[0056] In an additional embodiment, one or more lipophilic moieties are conjugated to one or more of the following internal positions: positions 4-8 and 13-18 on the sense strand, and positions 6-10 and 15-18 on the antisense strand, counting from the 5′end of each strand. Optionally, one or more lipophilic moieties are conjugated to one or more of the following internal positions: positions 5, 6, 7, 15, and 17 on the sense strand, and positions 15 and 17 on the antisense strand, counting from the 5′-end of each strand. In certain embodiments, the sense strand is 21 nucleotides in length and the antisense strand is 23 nucleotides in length.

[0057] In certain embodiments, the lipophilic moiety is an aliphatic, alicyclic, or polyalicyclic compound. Optionally, the lipophilic moiety is lipid, cholesterol, retinoic acid, cholic acid, adamantane acetic acid, 1-pyrene butyric acid, dihydrotestosterone, 1,3-bis-O(hexadecyl)glycerol, geranyloxyhexyanol, hexadecylglycerol, borneol, menthol, 1,3-propanediol, heptadecyl group, palmitic acid, myristic acid, O3-(oleoyl)lithocholic acid, O3-(oleoyl)cholenic acid, dimethoxytrityl, or phenoxazine.

[0058] In some embodiments, the lipophilic moiety contains a saturated or unsaturated C₄-C₃₀ hydrocarbon chain, and an optional functional group selected that is hydroxyl, amine, carboxylic acid, sulfonate, phosphate, thiol, azide, or alkyne.

[0059] In certain embodiments, the lipophilic moiety contains a saturated or unsaturated C₆-C₁₈ hydrocarbon chain. Optionally, the lipophilic moiety contains a saturated or unsaturated C₁₆ hydrocarbon chain. In a related embodiment, the lipophilic moiety is conjugated via a carrier that replaces one or more nucleotide(s) in the internal position(s). In certain embodiments, the carrier is a cyclic group that is pyrrolidinyl, pyrazolinyl, pyrazolidinyl, imidazolinyl, imidazolidinyl, piperidinyl, piperazinyl, [1,3]dioxolanyl, oxazolidinyl, isoxazolidinyl, morpholinyl, thiazolidinyl, isothiazolidinyl, quinoxalinyl, pyridazinonyl, tetrahydrofuranyl, or decalinyl; or is an acyclic moiety based on a serinol backbone or a diethanolamine backbone.

[0060] In some embodiments, the lipophilic moiety is conjugated to the double-stranded RNAi agent via a linker containing an ether, thioether, urea, carbonate, amine, amide, maleimide-thioether, disulfide, phosphodiester, sulfonamide linkage, a product of a click reaction, or carbamate.

[0061] In one embodiment, the lipophilic moiety is conjugated to a nucleobase, sugar moiety, or internucleosidic linkage.

[0062] In another embodiment, the double-stranded RNAi agent further includes a phosphate or phosphate mimic at the 5′-end of the antisense strand. Optionally, the phosphate mimic is a 5′-vinyl phosphonate (VP).

[0063] In certain embodiments, the double-stranded RNAi agent further includes a targeting ligand that targets a receptor which mediates delivery to a CNS tissue, e.g., a hydrophilic ligand. In certain embodiments, the targeting ligand is a C16 ligand.

[0064] In some embodiments, the double-stranded RNAi agent further includes a targeting ligand that targets a brain tissue, e.g., striatum.

[0065] In some embodiments, the double-stranded RNAi agent further includes a targeting ligand that targets a liver tissue, e.g., hepatocytes.

[0066] In one embodiment, the lipophilic moeity or targeting ligand is conjugated via a bio-cleavable linker that is DNA, RNA, disulfide, amide, functionalized monosaccharides or oligosaccharides of galactosamine, glucosamine, glucose, galactose, mannose, or a combination thereof.

[0067] In a related embodiment, the 3′ end of the sense strand is protected via an end cap which is a cyclic group having an amine, the cyclic group being pyrrolidinyl, pyrazolinyl, pyrazolidinyl, imidazolinyl, imidazolidinyl, piperidinyl, piperazinyl, [1,3]dioxolanyl, oxazolidinyl, isoxazolidinyl, morpholinyl, thiazolidinyl, isothiazolidinyl, quinoxalinyl, pyridazinonyl, tetrahydrofuranyl, or decalinyl.

[0068] In one embodiment, the RNAi agent includes at least one modified nucleotide that is a 2′-O-methyl modified nucleotide, a 2′-fluoro modified nucleotide, a nucleotide that includes a glycol nucleic acid (GNA) or a nucleotide that includes a vinyl phosphonate. Optionally, the RNAi agent includes at least one of each of the following modifications: 2′-O-methyl modified nucleotide, a 2′-fluoro modified nucleotide, a nucleotide comprising a glycol nucleic acid (GNA) and a nucleotide comprising vinyl phosphonate.

[0069] In another embodiment, the RNAi agent includes a pattern of modified nucleotides as provided below in Tables 2-5 and 7-10 where locations of 2′-C16, 2′-O-methyl, GNA, phosphorothioate and 2′-fluoro modifications, irrespective of the individual nucleotide base sequences of the displayed RNAi agents. In one embodiment, the RNAi agent includes a pattern of modified nucleotides as provided below in Tables 7 and 8 where locations of 2′-C16, 2′-O-methyl, GNA, phosphorothioate and 2′-fluoro modifications, irrespective of the individual nucleotide base sequences of the displayed RNAi agents. In one embodiment, the RNAi agent includes a pattern of modified nucleotides as provided below in Tables 9 and 10 where locations of 2′-C16, 2′-O-methyl, GNA, phosphorothioate and 2′-fluoro modifications, irrespective of the individual nucleotide base sequences of the displayed RNAi agents.

[0070] Another aspect of the instant disclosure provides a double stranded RNAi agent for inhibiting expression of an APOE gene, where the double stranded RNAi agent includes a sense strand complementary to an antisense strand, where the antisense strand includes a region complementary to part of an mRNA encoding APOE, where each strand is about 14 to about 30 nucleotides in length, where the double stranded RNAi agent is represented by formula (III):

(III)
sense:
5′ nₚ-Nₐ-(X X X)ᵢ-N_{b}-Y Y Y-N_{b}-(Z Z Z)ⱼ-Nₐ-n_{q} 3′
antisense:
3′ nₚ′-Nₐ′-(X′X′X′)ₖ-N_{b}′-Y′Y′Y′-N_{b}′-(Z′Z′Z′)ₗ-
Nₐ′-n_{q}′ 5′

[0071] where:

[0072] i, j, k, and l are each independently 0 or 1;

[0073] p, p′, q, and q′ are each independently 0-6;

[0074] each Nₐ and Nₐ′ independently represents an oligonucleotide sequence including 0-25 nucleotides which are either modified or unmodified or combinations thereof, each sequence including at least two differently modified nucleotides;

[0075] each N_{b} and N_{b}′ independently represents an oligonucleotide sequence including 0-10 nucleotides which are either modified or unmodified or combinations thereof;

[0076] each nₚ, nₚ′, n_{q}, and n_{q}′, each of which may or may not be present, independently represents an overhang nucleotide;

[0077] XXX, YYY, ZZZ, X′X′X′, Y′Y′Y′, and Z′Z′Z′ each independently represent one motif of three identical modifications on three consecutive nucleotides;

modifications on N_{b} differ from the modification on Y and modifications on N_{b}′ differ from the modification on Y′; and

[0078] where the sense strand is conjugated to at least one ligand.

[0079] In one embodiment, i is 0; j is 0; i is 1; j is 1; both i and j are 0; or both i and j are 1.

[0080] In another embodiment, k is 0; l is 0; k is 1; l is 1; both k and l are 0; or both k and l are 1.

[0081] In certain embodiments, XXX is complementary to X′X′X′, YYY is complementary to Y′Y′Y′, and ZZZ is complementary to Z′Z′Z′.

[0082] In certain embodiments, the double stranded RNAi agents inhibit the expression of an APOE2 allele, an APOE3 allele, and an APOE4 allele. In other embodiments, the double stranded RNAi agents inhibit the expression of APOE4 but do not substantially inhibit the expression of APOE2 and APOE3, e.g., the expression of APOE2 and APOE3 is inhibited by no more than about 10%.

[0083] In another embodiment, the YYY motif occurs at or near the cleavage site of the sense strand.

[0084] In an additional embodiment, the Y′Y′Y′ motif occurs at the 11, 12 and 13 positions of the antisense strand from the 5′-end. Optionally, the Y′ is 2′-O-methyl.

[0085] In some embodiments, formula (III) is represented by formula (IIIa):

(IIIa)
sense:
5′ nₚ-Nₐ-Y Y Y-Nₐ-n_{q} 3′
antisense:
3′ n_{p′}-N_{a′}-Y′Y′Y′-N_{a′}-n_{q′} 5′.

[0086] In another embodiment, formula (III) is represented by formula (IIIb):

(IIIb)
sense:
5′ nₚ-Nₐ-Y Y Y-N_{b}-Z Z Z-Nₐ-n_{q} 3′
antisense:
3′ n_{p′}-N_{a′}-Y′Y′Y′-N_{b′}-Z′Z′Z′-N_{a′}-n_{q′} 5′

[0087] where each N_{b} and N_{b}′ independently represents an oligonucleotide sequence including 1-5 modified nucleotides.

[0088] In an additional embodiment, formula (III) is represented by formula (IIIc):

(IIIc)
sense:
5′ nₚ-Nₐ-X X X-N_{b}-Y Y Y-Nₐ-n_{q} 3′
antisense:
3′ n_{p′}-N_{a′}-X′X′X′-N-Y′Y′Y′-N_{a′}-n_{q′} 5′

[0089] where each N_{b} and N_{b}′ independently represents an oligonucleotide sequence including 1-5 modified nucleotides.

[0090] In certain embodiments, formula (III) is represented by formula (IIId):

(IIId)
sense:
5′ nₚ-Nₐ-X X X-N_{b}-Y Y Y-N_{b}-Z Z Z-Nₐ-n_{q} 3′
antisense:
3′ n_{p′}-N_{a′}-X′X′X′-N_{b′}-Y′Y′Y′-N_{b′}-Z′Z′Z′-N_{a′}-n_{q′} 5′

[0091] where each N_{b} and N_{b}′ independently represents an oligonucleotide sequence including 1-5 modified nucleotides and each Nₐ and Nₐ′ independently represents an oligonucleotide sequence including 2-10 modified nucleotides.

[0092] In another embodiment, the double stranded region is 15-30 nucleotide pairs in length. Optionally, the double stranded region is 17-23 nucleotide pairs in length.

[0093] In certain embodiments, the double stranded region is 17-25 nucleotide pairs in length. Optionally, the double stranded region is 23-27 nucleotide pairs in length.

[0094] In some embodiments, the double stranded region is 19-21 nucleotide pairs in length. Optionally, the double stranded region is 21-23 nucleotide pairs in length.

[0095] In certain embodiments, each strand has 15-30 nucleotides. Optionally, each strand has 19-30 nucleotides. Optionally, each strand has 19-23 nucleotides.

[0096] In certain embodiments, the double stranded region is 19-21 nucleotide pairs in length and each strand has 19-23 nucleotides.

[0097] In another embodiment, the modifications on the nucleotides of the RNAi agent are LNA, glycol nucleic acid (GNA), HNA, CeNA, 2′-methoxyethyl, 2′-O-alkyl, 2′-O-allyl, 2′-C-allyl, 2′-fluoro, 2′-deoxy or 2′-hydroxyl, and combinations thereof. Optionally, the modifications on nucleotides include 2′-O-methyl, 2′-fluoro or GNA, and combinations thereof. In a related embodiment, the modifications on the nucleotides are 2′-O-methyl or 2′-fluoro modifications.

[0098] In one embodiment the RNAi agent includes a ligand that is or includes one or more lipophilic, e.g., C16, moieties attached through a bivalent or trivalent branched linker.

[0099] In other embodiments, the agent further comprises a targeting ligand that targets a liver tissue, e.g., one or more GalNAc derivatives.

[0100] In yet other embodiments, the agents further comprise a lipophilic ligand, e.g., a C16 ligand, conjugated to the 3′ end of the sense strand through a monovalent or branched bivalent or trivalent linker and a targeting ligand that targets a liver tissue, e.g., one or more GalNAc derivatives conjugated to the 3′ end of the sense strand through a monovalent or branched bivalent or trivalent linker.

[0101] In certain embodiments, the ligand is attached to the 3′ end of the sense strand.

[0102] In some embodiments, the RNAi agent further includes at least one phosphorothioate or methylphosphonate internucleotide linkage. In a related embodiment, the phosphorothioate or methylphosphonate internucleotide linkage is at the 3′-terminus of one strand. Optionally, the strand is the antisense strand. In another embodiment, the strand is the sense strand. In a related embodiment, the phosphorothioate or methylphosphonate internucleotide linkage is at the 5′-terminus of one strand. Optionally, the strand is the antisense strand. In another embodiment, the strand is the sense strand.

[0103] In another embodiment, the phosphorothioate or methylphosphonate internucleotide linkage is at the both the 5′- and 3′-terminus of one strand. Optionally, the strand is the antisense strand. In another embodiment, the strand is the sense strand.

[0104] In an additional embodiment, the base pair at the 1 position of the 5′-end of the antisense strand of the RNAi agent duplex is an A:U base pair.

[0105] In certain embodiments, the Y nucleotides contain a 2′-fluoro modification.

[0106] In some embodiments, the Y′ nucleotides contain a 2′-O-methyl modification.

[0107] In certain embodiments, p′>0. Optionally, p′=2.

[0108] In some embodiments, q′=0, p=0, q=0, and p′ overhang nucleotides are complementary to the target mRNA.

[0109] In certain embodiments, q′=0, p=0, q=0, and p′ overhang nucleotides are non-complementary to the target mRNA.

[0110] In one embodiment, the sense strand of the RNAi agent has a total of 21 nucleotides and the antisense strand has a total of 23 nucleotides.

[0111] In another embodiment, at least one nₚ′ is linked to a neighboring nucleotide via a phosphorothioate linkage. Optionally, all nₚ′ are linked to neighboring nucleotides via phosphorothioate linkages.

[0112] In certain embodiments, the APOE RNAi agent of the instant disclosure is one of those listed in Tables 2-5 and 7-10. In certain embodiments, the APOE RNAi agent of the instant disclosure is one of those listed in Tables 7 and 8. In some embodiments, all of the nucleotides of the sense strand and all of the nucleotides of the antisense strand include a modification. In certain embodiments, the APOE RNAi agent of the instant disclosure is one of those listed in Tables 9 and 10. In some embodiments, all of the nucleotides of the sense strand and all of the nucleotides of the antisense strand include a modification.

[0113] Another aspect of the instant disclosure provides a double stranded RNAi agent for inhibiting expression of an APOE gene in a cell, where the double stranded RNAi agent includes a sense strand complementary to an antisense strand, where the antisense strand includes a region complementary to part of an mRNA encoding an APOE gene, where each strand is about 14 to about 30 nucleotides in length, where the double stranded RNAi agent is represented by formula (III):

(III)
sense:
5′ nₚ-Nₐ-(X X X)ᵢ-N_{b}-Y Y Y-N_{b}-(Z Z Z)ⱼ-Nₐ-n_{q} 3′
antisense:
3′ n_{p′}-N_{a′}-(X′X′X′)ₖ-N_{b′}-Y′Y′Y′-N_{b′}-(Z′Z′Z′)ₗ-
N_{a′}-n_{q′} 5′

[0114] where:

[0115] i, j, k. and l are each independently 0 or 1;

[0116] p, p′, q, and q′ are each independently 0-6;

[0117] each Nₐ and Nₐ′ independently represents an oligonucleotide sequence including 0-25 nucleotides which are either modified or unmodified or combinations thereof, each sequence including at least two differently modified nucleotides;

[0118] each N_{b} and N_{b}′ independently represents an oligonucleotide sequence including 0-10 nucleotides which are either modified or unmodified or combinations thereof;

[0119] each nₚ, nₚ′, n_{q}, and n_{q}′, each of which may or may not be present independently represents an overhang nucleotide;

[0120] XXX, YYY, ZZZ. X′X′X′, Y′Y′Y′, and Z′Z′Z′ each independently represent one motif of three identical modifications on three consecutive nucleotides, and where the modifications are 2′-O-methyl or 2′-fluoro modifications;

[0121] modifications on N_{b} differ from the modification on Y and modifications on N_{b}′ differ from the modification on Y′; and

[0122] where the sense strand is conjugated to at least one ligand, optionally where the ligand is one or more lipophilic, e.g., Cl6, ligands, and/or one or more GalNAc derivatives.

[0123] In certain embodiments, the double stranded RNAi agents inhibit the expression of an APOE2 allele, an APOE3 allele, and an APOE4 allele. In other embodiments, the double stranded RNAi agents inhibit the expression of APOE4 but do not substantially inhibit the expression of APOE2 and APOE3, e.g., the expression of APOE2 and APOE3 is inhibited by no more than about 10%.

[0124] An additional aspect of the instant disclosure provides a double stranded RNAi agent for inhibiting expression of an APOE gene in a cell, where the double stranded RNAi agent includes a sense strand complementary to an antisense strand, where the antisense strand includes a region complementary to part of an mRNA encoding APOE, where each strand is about 14 to about 30 nucleotides in length, where the double stranded RNAi agent is represented by formula (III):

(III)
sense:
5′ nₚ-Nₐ-(X X X)ᵢ-N_{b}-Y Y Y-N_{b}-(Z Z Z)ⱼ-Nₐ-n_{q} 3′
antisense:
3′ nₚ′-Nₐ′-(X′X′X′)ₖ-N_{b}′-Y′Y′Y′-N_{b}′-(Z′Z′Z′)ₗ-
Nₐ′-n_{q}′ 5′

[0125] where:

[0126] i, j, k, and l are each independently 0 or 1;

[0127] each nₚ, n_{q}, and n_{q}′, each of which may or may not be present, independently represents an overhang nucleotide;

[0128] p, q, and q′ are each independently 0-6;

[0129] nₚ′>0 and at least one nₚ′ is linked to a neighboring nucleotide via a phosphorothioate linkage;

[0130] each Nₐ and Nₐ′ independently represents an oligonucleotide sequence including 0-25 nucleotides which are either modified or unmodified or combinations thereof, each sequence including at least two differently modified nucleotides;

[0131] each N_{b} and N_{b}′ independently represents an oligonucleotide sequence including 0-10 nucleotides which are either modified or unmodified or combinations thereof;

[0132] XXX, YYY, ZZZ, X′X′X′, Y′Y′Y′, and Z′Z′Z′ each independently represent one motif of three identical modifications on three consecutive nucleotides, and where the modifications are 2′-O-methyl, glycol nucleic acid (GNA) or 2′-fluoro modifications;

[0133] modifications on N_{b} differ from the modification on Y and modifications on N_{b}′ differ from the modification on Y′; and

[0134] where the sense strand is conjugated to at least one ligand, optionally where the ligand is one or more lipophilic, e.g., C16, ligands, and/or one or more GalNAc derivatives.

[0135] In certain embodiments, the double stranded RNAi agents inhibit the expression of an APOE2 allele, an APOE3 allele, and an APOE4 allele. In other embodiments, the double stranded RNAi agents inhibit the expression of APOE4 but do not substantially inhibit the expression of APOE2 and APOE3, e.g., the expression of APOE2 and APOE3 is inhibited by no more than about 10%.

[0136] Another aspect of the instant disclosure provides a double stranded RNAi agent for inhibiting expression of an APOE gene in a cell, where the double stranded RNAi agent includes a sense strand complementary to an antisense strand, where the antisense strand includes a region complementary to part of an mRNA encoding APOE (SEQ ID NO: 1, or a nucleotide sequence having at least 90% nucleotide sequence identity, e.g. 90, 91, 92, 93, 94, 95, 96, 97, 98, 99 or 100% identity, to the entire nucleotide sequence of SEQ ID NO:1), where each strand is about 14 to about 30 nucleotides in length, where the double stranded RNAi agent is represented by formula (III):

(III)
sense:
5′ nₚ-Nₐ-(X X X)ᵢ-N_{b}-Y Y Y-N_{b}-(Z Z Z)ⱼ-Nₐ-n_{q} 3′
antisense:
3′ nₚ′-Nₐ′-(X′X′X′)ₖ-N_{b}′-Y′Y′Y′-N_{b}′-(Z′Z′Z′)ₗ-
Nₐ′-n_{q}′ 5′

[0137] where:

[0138] i, j, k, and l are each independently 0 or 1;

[0139] each nₚ, n_{q}, and n_{q}′, each of which may or may not be present, independently represents an overhang nucleotide;

[0140] p, q, and q′ are each independently 0-6;

[0141] nₚ′>0 and at least one nₚ′ is linked to a neighboring nucleotide via a phosphorothioate linkage;

[0142] each Nₐ and Nₐ′ independently represents an oligonucleotide sequence including 0-25 nucleotides which are either modified or unmodified or combinations thereof, each sequence including at least two differently modified nucleotides;

[0143] each N_{b} and N_{b}′ independently represents an oligonucleotide sequence including 0-10 nucleotides which are either modified or unmodified or combinations thereof;

[0144] XXX, YYY, ZZZ, X′X′X′, Y′Y′Y′, and Z′Z′Z′ each independently represent one motif of three identical modifications on three consecutive nucleotides, and where the modifications are 2′-O-methyl or 2′-fluoro modifications;

[0145] modifications on N_{b} differ from the modification on Y and modifications on N_{b}′ differ from the modification on Y′; and

[0146] where the sense strand is conjugated to at least one ligand, optionally where the ligand is one or more lipophilic, e.g., C16, ligands, and/or one or more GalNAc derivatives.

[0147] In certain embodiments, the double stranded RNAi agents inhibit the expression of an APOE2 allele, an APOE3 allele, and an APOE4 allele. In other embodiments, the double stranded RNAi agents inhibit the expression of APOE4 but do not substantially inhibit the expression of APOE2 and APOE3, e.g., the expression of APOE2 and APOE3 is inhibited by no more than about 10%.

[0148] An additional aspect of the instant disclosure provides a double stranded RNAi agent for inhibiting expression of an APOE gene in a cell, where the double stranded RNAi agent includes a sense strand complementary to an antisense strand, where the antisense strand includes a region complementary to part of an mRNA encoding APOE (SEQ ID NO: 1, or a nucleotide sequence having at least 90% nucleotide sequence identity, e.g. 90, 91, 92, 93, 94, 95, 96, 97, 98, 99 or 100% identity, to the entire nucleotide sequence of SEQ ID NO: 1), where each strand is about 14 to about 30 nucleotides in length, where the double stranded RNAi agent is represented by formula (III):

(III)
sense:
5′ nₚ-Nₐ-(X X X)ᵢ-N_{b}-Y Y Y-N_{b}-(Z Z Z)ⱼ-Nₐ-n_{q} 3′
antisense:
3′ nₚ′-Nₐ′-(X′X′X′)ₖ-N_{b}′-Y′Y′Y′-N_{b}′-(Z′Z′Z′)ₗ-
Nₐ′-n_{q}′ 5′

[0149] where:

[0150] i, j, k, and l are each independently 0 or 1;

[0151] each nₚ, n_{q}, and n_{q}′, each of which may or may not be present, independently represents an overhang nucleotide;

[0152] p, q, and q′ are each independently 0-6;

[0153] nₚ′>0 and at least one nₚ′ is linked to a neighboring nucleotide via a phosphorothioate linkage;

[0154] each Nₐ and Nₐ′ independently represents an oligonucleotide sequence including 0-25 nucleotides which are either modified or unmodified or combinations thereof, each sequence including at least two differently modified nucleotides;

[0155] each N_{b} and N_{b}′ independently represents an oligonucleotide sequence including 0-10 nucleotides which are either modified or unmodified or combinations thereof;

[0156] XXX, YYY, ZZZ, X′X′X′, Y′Y′Y′, and Z′Z′Z′ each independently represent one motif of three identical modifications on three consecutive nucleotides, and where the modifications are 2′-O-methyl or 2′-fluoro modifications;

[0157] modifications on N_{b} differ from the modification on Y and modifications on N_{b}′ differ from the modification on Y′;

[0158] where the sense strand includes at least one phosphorothioate linkage; and

[0159] where the sense strand is conjugated to at least one ligand, optionally where the ligand is one or more lipophilic, e.g., C16, ligands and/or one or more GalNAc derivatives.

[0160] In certain embodiments, the double stranded RNAi agents inhibit the expression of an APOE2 allele, an APOE3 allele, and an APOE4 allele. In other embodiments, the double stranded RNAi agents inhibit the expression of APOE4 but do not substantially inhibit the expression of APOE2 and APOE3, e.g., the expression of APOE2 and APOE3 is inhibited by no more than about 10%.

[0161] Another aspect of the instant disclosure provides a double stranded RNAi agent for inhibiting expression of an APOE gene in a cell, where the double stranded RNAi agent includes a sense strand complementary to an antisense strand, where the antisense strand includes a region complementary to part of an mRNA encoding APOE (SEQ ID NO: 1, or a nucleotide sequence having at least 90% nucleotide sequence identity, e.g. 90, 91, 92, 93, 94, 95, 96, 97, 98, 99 or 100% identity, to the entire nucleotide sequence of SEQ ID NO: 1), where each strand is about 14 to about 30 nucleotides in length, where the double stranded RNAi agent is represented by formula (III):

(IIIa)
sense:
5′ nₚ-Nₐ-Y Y Y-Nₐ-n_{q} 3′
antisense:
3′ nₚ′-Nₐ′-Y′Y′Y′-Nₐ′-n_{q}′ 5′

[0162] where:

[0163] each nₚ, n_{q}, and n_{q}′, each of which may or may not be present, independently represents an overhang nucleotide;

[0164] p, q, and q′ are each independently 0-6;

[0165] nₚ′>0 and at least one nₚ′ is linked to a neighboring nucleotide via a phosphorothioate linkage;

[0166] each Nₐ and Nₐ′ independently represents an oligonucleotide sequence including 0-25 nucleotides which are either modified or unmodified or combinations thereof, each sequence including at least two differently modified nucleotides; YYY and Y′Y′Y′ each independently represent one motif of three identical modifications on three consecutive nucleotides, and where the modifications are 2′-O-methyl or 2′-fluoro modifications;

[0167] where the sense strand includes at least one phosphorothioate linkage; and

[0168] where the sense strand is conjugated to at least one ligand, optionally where the ligand is one or more lipophilic, e.g., C16 ligands, and/or one or more GalNAc derivatives.

[0169] In certain embodiments, the double stranded RNAi agents inhibit the expression of an APOE2 allele, an APOE3 allele, and an APOE4 allele. In other embodiments, the double stranded RNAi agents inhibit the expression of APOE4 but do not substantially inhibit the expression of APOE2 and APOE3, e.g., the expression of APOE2 and APOE3 is inhibited by no more than about 10%.

[0170] An additional aspect of the instant disclosure provides a double stranded RNAi agent for inhibiting expression of an APOE gene, where the double stranded RNAi agent targeted to APOE includes a sense strand and an antisense strand forming a double stranded region, where the sense strand includes at least 15 contiguous nucleotides differing by no more than 3 nucleotides (i.e., differing by 3, 2, 1, or 0 nucleotides) from any one of the nucleotide sequences of SEQ ID NOs: 1, 3, 5, 7, and 9, or a nucleotide sequence having at least 90% nucleotide sequence identity, e.g. 90, 91, 92, 93, 94, 95, 96, 97, 98, 99 or 100% identity, to the entire nucleotide sequence of any one of SEQ ID NOs: 1, 3, 5, 7, or 9, and the antisense strand includes at least 15 contiguous nucleotides differing by no more than 3 nucleotides (i.e., differing by 3, 2, 1, or 0 nucleotides) from any one of the nucleotide sequences of SEQ ID NOs: 2, 4, 6, 8, and 10, or a nucleotide sequence having at least 90% nucleotide sequence identity, e.g. 90, 91, 92, 93, 94, 95, 96, 97, 98, 99 or 100% identity, to the entire nucleotide sequence of any one of SEQ ID NOs: 2, 4, 6, 8, and 10; where a substitution of a uracil for any thymine in the sequences provided in the SEQ ID NOs: 1-10 (when comparing aligned sequences) does not count as a difference that contributes to the differing by no more than 3 nucleotides from any one of the nucleotide sequences provided in SEQ ID NOs: 1-10, where substantially all of the nucleotides of the sense strand include a modification that is a 2′-O-methyl modification, a GNA or a 2′-fluoro modification, where the sense strand includes two phosphorothioate internucleotide linkages at the 5′-terminus, where substantially all of the nucleotides of the antisense strand include a modification selected from the group consisting of a 2′-O-methyl modification and a 2′-fluoro modification, where the antisense strand includes two phosphorothioate internucleotide linkages at the 5′-terminus and two phosphorothioate internucleotide linkages at the 3′-terminus, and where the sense strand is conjugated to one or more lipophilic, e.g., C16, ligands, optionally, further comprising a liver targeting ligand, e.g., a ligand comprising one or more GalNAc derivatives.

[0171] In certain embodiments, the double stranded RNAi agents inhibit the expression of an APOE2 allele, an APOE3 allele, and an APOE4 allele. In other embodiments, the double stranded RNAi agents inhibit the expression of APOE4 but do not substantially inhibit the expression of APOE2 and APOE3, e.g., the expression of APOE2 and APOE3 is inhibited by no more than about 10%.

[0172] Another aspect of the instant disclosure provides a double stranded RNAi agent for inhibiting expression of an APOE gene, where the double stranded RNAi agent targeted to APOE includes a sense strand and an antisense strand forming a double stranded region, where the sense strand includes at least 15 contiguous nucleotides differing by no more than 3 nucleotides (i.e., differing by 3, 2, 1, or 0 nucleotides) from any one of the nucleotide sequences of SEQ ID NOs: 1, 3, 5, 7, and 9, or a nucleotide sequence having at least 90% nucleotide sequence identity, e.g. 90, 91, 92, 93, 94, 95, 96, 97, 98, 99 or 100% identity, to the entire nucleotide sequence of any one of SEQ ID NOs: 1, 3, 5, 7, or 9, and the antisense strand includes at least 15 contiguous nucleotides differing by no more than 3 nucleotides (i.e., differing by 3, 2, 1, or 0 nucleotides) from any one of the nucleotide sequences of SEQ ID NOs: 2, 4, 6, 8, and 10, or a nucleotide sequence having at least 90% nucleotide sequence identity, e.g. 90, 91, 92, 93, 94, 95, 96, 97, 98, 99 or 100% identity, to the entire nucleotide sequence of any one of SEQ ID NOs: 2, 4, 6, 8, and 10, where a substitution of a uracil for any thymine in the sequences provided in the SEQ ID NOs: 1-10 (when comparing aligned sequences) does not count as a difference that contributes to the differing by no more than 3 nucleotides from any one of the nucleotide sequences provided in SEQ ID NOs:1-10; where the sense strand includes at least one 3′-terminal deoxy-thymidine nucleotide (dT), and where the antisense strand includes at least one 3′-terminal deoxy-thymidine nucleotide (dT).

[0173] In certain embodiments, the double stranded RNAi agents inhibit the expression of an APOE2 allele, an APOE3 allele, and an APOE4 allele. In other embodiments, the double stranded RNAi agents inhibit the expression of APOE4 but do not substantially inhibit the expression of APOE2 and APOE3, e.g., the expression of APOE2 and APOE3 is inhibited by no more than about 10%.

[0174] In one embodiment, all of the nucleotides of the sense strand and all of the nucleotides of the antisense strand are modified nucleotides.

[0175] In another embodiment, each strand has 19-30 nucleotides.

[0176] In certain embodiments, the antisense strand of the RNAi agent includes at least one thermally destabilizing modification of the duplex within the first 9 nucleotide positions of the 5′ region or a precursor thereof. Optionally, the thermally destabilizing modification of the duplex is one or more of

[chemical structure]

where B is nucleobase.

[0177] Another aspect of the instant disclosure provides a cell containing a double stranded RNAi agent of the instant disclosure.

[0178] An additional aspect of the instant disclosure provides a pharmaceutical composition for inhibiting expression of an APOE gene that includes a double stranded RNAi agent of the instant disclosure.

[0179] In one embodiment, the double stranded RNAi agent is administered in an unbuffered solution. Optionally, the unbuffered solution is saline or water.

[0180] In another embodiment, the double stranded RNAi agent is administered with a buffer solution. Optionally, the buffer solution includes acetate, citrate, prolamine, carbonate, or phosphate or any combination thereof. In another embodiment, the buffer solution is phosphate buffered saline (PBS).

[0181] Another aspect of the disclosure provides a pharmaceutical composition that includes a double stranded RNAi agent of the instant disclosure and a lipid formulation.

[0182] In one embodiment, the lipid formulation includes a lipid nanoparticle (LNP).

[0183] An additional aspect of the disclosure provides a method of inhibiting expression of an APOE gene in a cell, the method involving: (a) contacting the cell with a double stranded RNAi agent of the instant disclosure or a pharmaceutical composition of the instant disclosure; and (b) maintaining the cell produced in step (a) for a time sufficient to obtain degradation of the mRNA transcript of an APOE gene, thereby inhibiting expression of the APOE gene in the cell.

[0184] In one embodiment, the cell is within a subject. Optionally, the subject is a human.

[0185] In certain embodiments, the subject is a rhesus monkey, a cynomolgous monkey, a mouse, or a rat.

[0186] In certain embodiments, the human subject suffers from an APOE-associated neurodegenerative disease, e.g., an amyloid-p-mediated disease, such as Alzheimer's's disease, Down's syndrome, and cerebral amyloid angiopathy, or a tau-mediated disease, e.g., a primary tauopathy, such as Frontotemporal dementia (FTD), Progressive supranuclear palsy (PSP), Cordicobasal degeneration (CBD), Pick's disease (PiD), Globular glial tauopathies (GGTs), frontotemporal dementia with parkinsonism (FTDP, FTDP-17), Chronic traumatic encelopathy (CTE), Dementia pugilistica, Frontotemporal lobar degeneration (FTLD), Argyrophilic grain disease (AGD), and Primary age-related tauopathy (PART), or a secondary tauopathy, e.g., AD, Creuzfeld Jakob's disease, Down's Syndrome, and Familial British Dementia.

[0187] In certain embodiments, the method further involves administering an additional therapeutic agent to the subject, such as a cholinesterase inhibitors and/or memantine.

[0188] In certain embodiments, the double stranded RNAi agent is administered at a dose of about 0.01 mg/kg to about 50 mg/kg.

[0189] In some embodiments, the double stranded RNAi agent is administered to the subject intrathecally.

[0190] In one embodiment, the method reduces the expression of an APOE gene in a brain (e.g., striatum) or spine tissue. Optionally, the brain or spine tissue is striatum, cortex, cerebellum, cervical spine, lumbar spine, or thoracic spine.

[0191] In some embodiments, the double stranded RNAi agent is administered to the subject subcutaneously.

[0192] In one embodiment, the method reduces the expression of an APOE gene in the liver.

[0193] In other embodiments, the method reduces the expression of an APOE gene in the liver and the brain.

[0194] Another aspect of the instant disclosure provides a method of inhibiting the expression of APOE in a subject, the method involving: administering to the subject a therapeutically effective amount of a double stranded RNAi agent of the disclosure or a pharmaceutical composition of the disclosure, thereby inhibiting the expression of APOE in the subject.

[0195] An additional aspect of the disclosure provides a method for treating or preventing an disorder or APOE-associated neurodegenerative disease or disorder in a subject, the method involving administering to the subject a therapeutically effective amount of a double stranded RNAi agent of the disclosure or a pharmaceutical composition of the disclosure, thereby treating or preventing an APOE-associated neurodegenerative disease or disorder in the subject.

[0196] In certain embodiments, the APOE-associated neurodegenerative disease is an amyloid-β-mediated disease, such as an amyloid-β-mediated disease selected from the group consisting of Alzheimer's's disease, Down's syndrome, and cerebral amyloid angiopathy.

[0197] In certain embodiments, the APOE-associated neurodegenerative disease is a tau-mediated disease, such as a primary tauopathy or a secondary tauopathy.

[0198] In certain embodiments, the primary tauopathy is selected from the group consisting of Frontotemporal dementia (FTD), Progressive supranuclear palsy (PSP), Cordicobasal degeneration (CBD), Pick's disease (PiD), Globular glial tauopathies (GGTs), frontotemporal dementia with parkinsonism (FTDP, FTDP-17), Chronic traumatic encelopathy (CTE), Dementia pugilistica, Frontotemporal lobar degeneration (FTLD), Argyrophilic grain disease (AGD), and Primary age-related tauopathy (PART).

[0199] In certain embodiments, the secondary tauopathy is selected from the group consisting of AD, Creuzfeld Jakob's disease, Down's Syndrome, and Familial British Dementia.

[0200] Another aspect of the instant disclosure provides a kit for performing a method of the instant disclosure, the kit including: a) a double stranded RNAi agent of the instant disclosure, and b) instructions for use, and c) optionally, a device for administering the double stranded RNAi agent to the subject.

[0201] An additional aspect of the instant disclosure provides a double stranded ribonucleic acid (RNAi) agent for inhibiting expression of an APOE gene, where the RNAi agent possesses a sense strand and an antisense strand, and where the antisense strand includes a region of complementarity which includes at least 15 contiguous nucleotides differing by no more than 3 nucleotides (i.e., differing by 3, 2, 1, or 0 nucleotides), e.g., at least 15 nucleotides (i.e., differing by 3, 2, 1, or 0 nucleotides), at least 19 nucleotides (i.e., differing by 3, 2, 1, or 0 nucleotides), from any one of the antisense strand nucleobase sequences of Tables 2-5 and 7-10. In one embodiment, the RNAi agent includes one or more of the following modifications: a 2′-O-methyl modified nucleotide, a 2′-fluoro modified nucleotide, a 2′-C-alkyl-modified nucleotide, a nucleotide comprising a glycol nucleic acid (GNA), a phosphorothioate (PS) and a vinyl phosphonate (VP). Optionally, the RNAi agent includes at least one of each of the following modifications: a 2′-O-methyl modified nucleotide, a 2′-fluoro modified nucleotide, a 2′-C-alkyl-modified nucleotide, a nucleotide comprising a glycol nucleic acid (GNA), a phosphorothioate and a vinyl phosphonate (VP).

[0202] In certain embodiments, the double stranded RNAi agents inhibit the expression of an APOE2 allele, an APOE3 allele, and an APOE4 allele. In other embodiments, the double stranded RNAi agents inhibit the expression of APOE4 but do not substantially inhibit the expression of APOE2 and APOE3, e.g., the expression of APOE2 and APOE3 is inhibited by no more than about 10%.

[0203] In another embodiment, the RNAi agent includes four or more PS modifications, optionally six to ten PS modifications, optionally eight PS modifications.

[0204] In an additional embodiment, each of the sense strand and the antisense strand of the RNAi agent possesses a 5′-terminus and a 3′-terminus, and the RNAi agent includes eight PS modifications positioned at each of the penultimate and ultimate internucleotide linkages from the respective 3′- and 5′-termini of each of the sense and antisense strands of the RNAi agent.

[0205] In another embodiment, each of the sense strand and the antisense strand of the RNAi agent includes a 5′-terminus and a 3′-terminus, and the RNAi agent includes only one nucleotide including a GNA. Optionally, the nucleotide including a GNA is positioned on the antisense strand at the seventh nucleobase residue from the 5′-terminus of the antisense strand.

[0206] In an additional embodiment, each of the sense strand and the antisense strand of the RNAi agent includes a 5′-terminus and a 3′-terminus, and the RNAi agent includes one to four 2′-C-alkyl-modified nucleotides. Optionally, the 2′-C-alkyl-modified nucleotide is a 2′-C16-modified nucleotide. Optionally, the RNAi agent includes a single 2′-C-alkyl, e.g., C16-modified nucleotide. Optionally, the single 2′-C-alkyl, e.g., C16-modified nucleotide is located on the sense strand at the sixth nucleobase position from the 5′-terminus of the sense strand.

[0207] In another embodiment, each of the sense strand and the antisense strand of the RNAi agent includes a 5′-terminus and a 3′-terminus, and the RNAi agent includes two or more 2′-fluoro modified nucleotides. Optionally, each of the sense strand and the antisense strand of the RNAi agent includes two or more 2′-fluoro modified nucleotides. Optionally, the 2′-fluoro modified nucleotides are located on the sense strand at nucleobase positions 7, 9, 10 and 11 from the 5′-terminus of the sense strand and on the antisense strand at nucleobase positions 2, 14 and 16 from the 5′-terminus of the antisense strand.

[0208] In an additional embodiment, each of the sense strand and the antisense strand of the RNAi agent includes a 5′-terminus and a 3′-terminus, and the RNAi agent includes one or more VP modifications. Optionally, the RNAi agent includes a single VP modification at the 5′-terminus of the antisense strand.

[0209] In another embodiment, each of the sense strand and the antisense strand of the RNAi agent includes a 5′-terminus and a 3′-terminus, and the RNAi agent includes two or more 2′-O-methyl modified nucleotides. Optionally, the RNAi agent includes 2′-O-methyl modified nucleotides at all nucleobase locations not modified by a 2′-fluoro, a 2′-C-alkyl or a glycol nucleic acid (GNA). Optionally, the two or more 2′-O-methyl modified nucleotides are located on the sense strand at positions 1, 2, 3, 4, 5, 8, 12, 13, 14, 15, 16, 17, 18, 19, 20 and 21 from the 5′-terminus of the sense strand and on the antisense strand at positions 1, 3, 4, 5, 6, 8, 9, 10, 11, 12, 13, 15, 17, 18, 19, 20, 21, 22 and 23 from the 5′-terminus of the antisense strand.

[0210] In one aspect, the present invention provides a method of inhibiting expression of an APOE gene in an astrocyte. The method includes contacting the astrocyte with the dsRNA agent or pharmaceutical composition of the invention; and maintaining the astrocyte produced for a time sufficient to obtain degradation of the mRNA transcript of the APOE gene, thereby inhibiting expression of the APOE gene in the astrocyte.

[0211] In certain embodiments, the cell is within a subject, e.g., a human subject.

[0212] In some embodiment, the contacting the astrocyte is by intrathecal administration of the pharmaceutical composition.

[0213] In certain embodiments, the antisense strand of the dsRNA agent comprises at least 15 contiguous nucleotides differing by no more than three nucleotides from any one of the antisense strand nucleotide sequences of a duplex selected from the group consisting of AD-1204704, AD-1204705, AD-1204708, and AD-1204712.

### BRIEF DESCRIPTIONS OF THE FIGURES

[0214] FIG. 1A is a graph depicting the percent of APOE mRNA remaining in the right hemisphere of the brain (BRH) of homozygous humanized APOE knock-in mice administered a single 300 μg dose of the indicated duplexes or artificial CSF (aCSF) control by intracerebroventricular injection (ICV) at day 14 post-dose.

[0215] FIG. 1B is a graph depicting the percent of APOE mRNA remaining in the liver of homozygous humanized APOE knock-in mice administered a single 300 μg dose of the indicated duplexes or artificial CSF (aCSF) control by intracerebroventricular injection (ICV) at day 14 post-dose.

[0216] FIG. 2 is a graph depicting the correlation of the activity of the agents AD-1204704, AD-1204705, AD-1204705, AD-1204706 AD-1204707, AD-1204708, AD-1204709, AD-1204710, AD-1204711, AD-1204712, and AD-1204713 in vitro to the activity of the agents in vivo.

### DETAILED DESCRIPTION OF THE INVENTION

[0217] The present disclosure provides RNAi compositions, which effect the RNA-induced silencing complex (RISC)-mediated cleavage of RNA transcripts of an gene. The APOE gene may be within a cell, e.g., a cell within a subject, such as a human. The present disclosure also provides methods of using the RNAi compositions of the disclosure for inhibiting the expression of an APOE gene or for treating a subject having a disorder that would benefit from inhibiting or reducing the expression of an APOE gene, e.g., a pathogenic APOE allele, i.e., APOE4, e.g., an APOE-associated neurodegenerative disease, for example, an amyloid-β-mediated disease or a tau-mediated disease.

[0218] The RNAi agents of the disclosure include an RNA strand (the antisense strand) having a region which is about 30 nucleotides or less in length, e.g., 15-30, 15-29, 15-28, 15-27, 15-26, 15-25, 15-24, 15-23, 15-22, 15-21, 15-20, 15-19, 15-18, 15-17, 18-30, 18-29, 18-28, 18-27, 18-26, 18-25, 18-24, 18-23, 18-22, 18-21, 18-20, 19-30, 19-29, 19-28, 19-27, 19-26, 19-25, 19-24, 19-23, 19-22, 19-21, 19-20, 20-30, 20-29, 20-28, 20-27, 20-26, 20-25, 20-24, 20-23, 20-22, 20-21, 21-30, 21-29, 21-28, 21-27, 21-26, 21-25, 21-24, 21-23, or 21-22 nucleotides in length, which region is substantially complementary to at least part of an mRNA transcript of an APOE gene. In certain embodiments, the RNAi agents of the disclosure include an RNA strand (the antisense strand) having a region which is about 21-23 nucleotides in length, which region is substantially complementary to at least part of an mRNA transcript of an APOE gene.

[0219] In certain embodiments, the RNAi agents of the disclosure include an RNA strand (the antisense strand) which can include longer lengths, for example up to 66 nucleotides, e.g., 36-66, 26-36, 25-36, 31-60, 22-43, 27-53 nucleotides in length with a region of at least 19 contiguous nucleotides that is substantially complementary to at least a part of an mRNA transcript of an APOE gene. These RNAi agents with the longer length antisense strands preferably include a second RNA strand (the sense strand) of 20-60 nucleotides in length wherein the sense and antisense strands form a duplex of 18-30 contiguous nucleotides.

[0220] The use of these RNAi agents enables the targeted degradation of mRNAs of an APOE gene in mammals. Thus, methods and compositions including these RNAi agents are useful for treating a subject who would benefit by a reduction in the levels or activity of an APOE protein, such as a subject having an APOE-associated neurodegenerative disease, e.g. an amyloid-β-mediated disease or a tau-mediated disease.

[0221] The following detailed description discloses how to make and use compositions containing RNAi agents to inhibit the expression of an APOE gene, as well as compositions and methods for treating subjects having diseases and disorders that would benefit from inhibition or reduction of the expression of the genes.

### I. Definitions

[0222] In order that the present disclosure may be more readily understood, certain terms are first defined. In addition, it should be noted that whenever a value or range of values of a parameter are recited, it is intended that values and ranges intermediate to the recited values are also intended to be part of this disclosure.

[0223] The articles “a” and “an” are used herein to refer to one or to more than one (i.e., to at least one) of the grammatical object of the article. By way of example, “an element” means one element or more than one element, e.g., a plurality of elements.

[0224] The term “including” is used herein to mean, and is used interchangeably with, the phrase “including but not limited to”. The term “or” is used herein to mean, and is used interchangeably with, the term “and/or,” unless context clearly indicates otherwise.

[0225] The term “about” is used herein to mean within the typical ranges of tolerances in the art. For example, “about” can be understood as about 2 standard deviations from the mean. In certain embodiments, about means±10%. In certain embodiments, about means±5%. When about is present before a series of numbers or a range, it is understood that “about” can modify each of the numbers in the series or range.

[0226] The term “at least”, “no less than”, or “or more” prior to a number or series of numbers is understood to include the number adjacent to the term “at least”, and all subsequent numbers or integers that could logically be included, as clear from context. For example, the number of nucleotides in a nucleic acid molecule must be an integer. For example, “at least 18 nucleotides of a 21 nucleotide nucleic acid molecule” means that 18, 19, 20, or 21 nucleotides have the indicated property. When at least is present before a series of numbers or a range, it is understood that “at least” can modify each of the numbers in the series or range.

[0227] As used herein, “no more than” or “less than” is understood as the value adjacent to the phrase and logical lower values or integers, as logical from context, to zero. For example, a duplex with an overhang of “no more than 2 nucleotides” has a 2, 1, or 0 nucleotide overhang. When “no more than” is present before a series of numbers or a range, it is understood that “no more than” can modify each of the numbers in the series or range.

[0228] As used herein, methods of detection can include determination that the amount of analyte present is below the level of detection of the method.

[0229] In the event of a conflict between an indicated target site and the nucleotide sequence for a sense or antisense strand, the indicated sequence takes precedence.

[0230] In the event of a conflict between a chemical structure and a chemical name, the chemical structure takes precedence.

[0231] The terms “APOE” or “APOE”, also known as “Apolipoprotein E,” “Alzheimer's Disease 2,” “LPG” and “LDLCQ5,” refer to the well-known gene that encodes the protein, APOE. APOE is synthesized throughout the body, primarily in the liver and functions as a lipid transport protein and is a major ligand for low density lipoprotein (LDL) receptors. APOE has been shown to play a role in cholesterol metabolism and cardiovascular disease and, more recently, has emerged as a major risk factor for Alzheimer's disease and is associated with the pathology of other neurodegenerative diseases.

[0232] Nucleotide and amino acid sequences of APOE can be found, for example, at GenBank Accession No. NM_000041.4 (Homo sapiens APOE, SEQ ID NO: 1, reverse complement, SEQ ID NO: 2); GenBank Accession No. NM_001270681.1 (Rattus norvegicus APOE, SEQ ID NO: 3; reverse complement, SEQ ID NO: 4); GenBank Accession No. NM_001305843.1 (Mus musculus APOE, SEQ ID NO: 5, reverse complement, SEQ ID NO: 6); GenBank Accession No. XM_028839202.1 (Macaca mulatta APOE, SEQ ID NO: 7, reverse complement, SEQ ID NO: 8); and GenBank Accession No. XM_005589554.2 (Macaca fascicularis APOE, SEQ ID NO: 9; reverse complement, SEQ ID NO: 10).

[0233] Additional examples of APOE sequences can be found in publically available databases, for example, GenBank, OMIM, and UniProt. Additional information on APOE can be found, for example, at www.ncbi.nlm.nih.gov/gene/348.

[0234] The term APOE as used herein also refers to variations of the APOE gene including variants of human APOE provided in the SNP database, for example, at ncbi.nlm.nih.gov/clinvar/?term=APOE [gene].

[0235] The human APOE gene contains two single-nucleotide polymorphisms that result in the three most common variants, APOE2 (also referred to as APOE*ε2 or ε2; Cys112, Cys158), APOE3 (also referred to as APOE*ε3 or ε3; Cys112, Arg 158), and APOE4 (also referred to as APOE*ε4 or ε4 (Arg112, Arg158). GenBank Accession No. NM_000041.4 (Homo sapiens APOE, SEQ ID NO: 1, reverse complement, SEQ ID NO: 2) is the nucleotide sequence of the APOE*ε3 (APOE3) variant; the APOE*ε2 (APOE2) variant has a single nucleotide change at nucleotide 595C>T of SEQ ID NO:1, and the APOE*ε4 (APOE4) variant has a single nucleotide change at nucleotide 457T>C of SEQ ID NO:1.

[0236] It is to be understood that, unless specified herein, the term “APOE,” “ApoE,” or the like, refers to any one or more of the three APOE variants or alleles. For example, as used herein, the term “an APOE gene” refers to an APOE2 allele, an APOE3 allele, and/or an APOE4 allele” while the term “APOE4 allele,” or the like, only refers to an APOE4 allele.

[0237] As used herein, “target sequence” refers to a contiguous portion of the nucleotide sequence of an mRNA molecule formed during the transcription of an APOE gene, including mRNA that is a product of RNA processing of a primary transcription product. In one embodiment, the target portion of the sequence will be at least long enough to serve as a substrate for RNAi-directed cleavage at or near that portion of the nucleotide sequence of an mRNA molecule formed during the transcription of an APOE gene.

[0238] The target sequence is about 15-30 nucleotides in length. For example, the target sequence can be from about 15-30 nucleotides, 15-29, 15-28, 15-27, 15-26, 15-25, 15-24, 15-23, 15-22, 15-21, 15-20, 15-19, 15-18, 15-17, 18-30, 18-29, 18-28, 18-27, 18-26, 18-25, 18-24, 18-23, 18-22, 18-21, 18-20, 19-30, 19-29, 19-28, 19-27, 19-26, 19-25, 19-24, 19-23, 19-22, 19-21, 19-20, 20-30, 20-29, 20-28, 20-27, 20-26, 20-25, 20-24, 20-23, 20-22, 20-21, 21-30, 21-29, 21-28, 21-27, 21-26, 21-25, 21-24, 21-23, or 21-22 nucleotides in length. In certain embodiments, the target sequence is 19-23 nucleotides in length, optionally 21-23 nucleotides in length. Ranges and lengths intermediate to the above recited ranges and lengths are also contemplated to be part of the disclosure.

[0239] As used herein, the term “strand comprising a sequence” refers to an oligonucleotide comprising a chain of nucleotides that is described by the sequence referred to using the standard nucleotide nomenclature.

[0240] “G,” “C,” “A,” “T”, and “U” each generally stand for a nucleotide that contains guanine, cytosine, adenine, thymidine, and uracil as a base, respectively in the context of a modified or unmodified nucleotide. However, it will be understood that the term “ribonucleotide” or “nucleotide” can also refer to a modified nucleotide, as further detailed below, or a surrogate replacement moiety (see, e.g., Table 1). The skilled person is well aware that guanine, cytosine, adenine, thymidine, and uracil can be replaced by other moieties without substantially altering the base pairing properties of an oligonucleotide comprising a nucleotide bearing such replacement moiety. For example, without limitation, a nucleotide comprising inosine as its base can base pair with nucleotides containing adenine, cytosine, or uracil. Hence, nucleotides containing uracil, guanine, or adenine can be replaced in the nucleotide sequences of dsRNA featured in the disclosure by a nucleotide containing, for example, inosine. In another example, adenine and cytosine anywhere in the oligonucleotide can be replaced with guanine and uracil, respectively to form G-U Wobble base pairing with the target mRNA. Sequences containing such replacement moieties are suitable for the compositions and methods featured in the disclosure.

[0241] The terms “iRNA”, “RNAi agent,” “iRNA agent,” “RNA interference agent” as used interchangeably herein, refer to an agent that contains RNA as that term is defined herein, and which mediates the targeted cleavage of an RNA transcript via an RNA-induced silencing complex (RISC) pathway. RNA interference (RNAi) is a process that directs the sequence-specific degradation of mRNA. RNAi modulates, e.g., inhibits, the expression of APOE in a cell, e.g., a cell within a subject, such as a mammalian subject.

[0242] In one embodiment, an RNAi agent of the disclosure includes a single stranded RNAi that interacts with a target RNA sequence, e.g., an APOE target mRNA sequence, to direct the cleavage of the target RNA. Without wishing to be bound by theory it is believed that long double stranded RNA introduced into cells is broken down into double-stranded short interfering RNAs (siRNAs) comprising a sense strand and an antisense strand by a Type III endonuclease known as Dicer (Sharp et al. (2001) Genes Dev. 15:485). Dicer, a ribonuclease-III-like enzyme, processes these dsRNA into 19-23 base pair short interfering RNAs with characteristic two base 3′ overhangs (Bernstein, et al., (2001) Nature 409:363). These siRNAs are then incorporated into an RNA-induced silencing complex (RISC) where one or more helicases unwind the siRNA duplex, enabling the complementary antisense strand to guide target recognition (Nykanen, et al., (2001) Cell 107:309). Upon binding to the appropriate target mRNA, one or more endonucleases within the RISC cleave the target to induce silencing (Elbashir, et al., (2001) Genes Dev. 15:188). Thus, in one aspect the disclosure relates to a single stranded RNA (ssRNA) (the antisense strand of a siRNA duplex) generated within a cell and which promotes the formation of a RISC complex to effect silencing of the target gene, i.e., an APOE gene. Accordingly, the term “siRNA” is also used herein to refer to an RNAi as described above.

[0243] In another embodiment, the RNAi agent may be a single-stranded RNA that is introduced into a cell or organism to inhibit a target mRNA. Single-stranded RNAi agents bind to the RISC endonuclease, Argonaute 2, which then cleaves the target mRNA. The single-stranded siRNAs are generally 15-30 nucleotides and are chemically modified. The design and testing of single-stranded RNAs are described in U.S. Pat. No. 8,101,348 and in Lima et al., (2012) Cell 150:883-894, the entire contents of each of which are hereby incorporated herein by reference. Any of the antisense nucleotide sequences described herein may be used as a single-stranded siRNA as described herein or as chemically modified by the methods described in Lima et al., (2012) Cell 150:883-894.

[0244] In another embodiment, a “RNAi agent” for use in the compositions and methods of the disclosure is a double stranded RNA and is referred to herein as a “double stranded RNAi agent,” “double stranded RNA (dsRNA) molecule,” “dsRNA agent,” or “dsRNA”. The term “dsRNA” refers to a complex of ribonucleic acid molecules, having a duplex structure comprising two anti-parallel and substantially complementary nucleic acid strands, referred to as having “sense” and “antisense” orientations with respect to a target RNA, i.e., an APOE gene. In some embodiments of the disclosure, a double stranded RNA (dsRNA) triggers the degradation of a target RNA, e.g., an mRNA, through a post-transcriptional gene-silencing mechanism referred to herein as RNA interference or RNAi.

[0245] In general, a dsRNA molecule can include ribonucleotides, but as described in detail herein, each or both strands can also include one or more non-ribonucleotides, e.g., a deoxyribonucleotide, a modified nucleotide. In addition, as used in this specification, an “RNAi agent” may include ribonucleotides with chemical modifications; an RNAi agent may include substantial modifications at multiple nucleotides. As used herein, the term “modified nucleotide” refers to a nucleotide having, independently, a modified sugar moiety, a modified internucleotide linkage, or a modified nucleobase. Thus, the term modified nucleotide encompasses substitutions, additions or removal of, e.g., a functional group or atom, to internucleoside linkages, sugar moieties, or nucleobases. The modifications suitable for use in the agents of the disclosure include all types of modifications disclosed herein or known in the art. Any such modifications, as used in a siRNA type molecule, are encompassed by “RNAi agent” for the purposes of this specification and claims.

[0246] In certain embodiments of the instant disclosure, inclusion of a deoxy-nucleotide—which is acknowledged as a naturally occurring form of nucleotide—if present within a RNAi agent can be considered to constitute a modified nucleotide.

[0247] The duplex region may be of any length that permits specific degradation of a desired target RNA through a RISC pathway, and may range from about 15-36 base pairs in length, for example, about 15, 16, 17, 18, 19, 20, 21, 22, 23, 24, 25, 26, 27, 28, 29, 30, 31, 32, 33, 34, 35, or 36 base pairs in length, such as about 15-30, 15-29, 15-28, 15-27, 15-26, 15-25, 15-24, 15-23, 15-22, 15-21, 15-20, 15-19, 15-18, 15-17, 18-30, 18-29, 18-28, 18-27, 18-26, 18-25, 18-24, 18-23, 18-22, 18-21, 18-20, 19-30, 19-29, 19-28, 19-27, 19-26, 19-25, 19-24, 19-23, 19-22, 19-21, 19-20, 20-30, 20-29, 20-28, 20-27, 20-26, 20-25, 20-24, 20-23, 20-22, 20-21, 21-30, 21-29, 21-28, 21-27, 21-26, 21-25, 21-24, 21-23, or 21-22 base pairs in length. In certain embodiments, the duplex region is 19-21 base pairs in length, e.g., 21 base pairs in length. Ranges and lengths intermediate to the above recited ranges and lengths are also contemplated to be part of the disclosure.

[0248] The two strands forming the duplex structure may be different portions of one larger RNA molecule, or they may be separate RNA molecules. Where the two strands are part of one larger molecule, and therefore are connected by an uninterrupted chain of nucleotides between the 3′-end of one strand and the 5′-end of the respective other strand forming the duplex structure, the connecting RNA chain is referred to as a “hairpin loop.” A hairpin loop can comprise at least one unpaired nucleotide. In some embodiments, the hairpin loop can comprise at at least 4, at least 5, at least 6, at least 7, at least 8, at least 9, at least 10, at least 20, at least 23 or more unpaired nucleotides or nucleotides not directed to the target site of the dsRNA. In some embodiments, the hairpin loop can be 10 or fewer nucleotides. In some embodiments, the hairpin loop can be 8 or fewer unpaired nucleotides. In some embodiments, the hairpin loop can be 4-10 unpaired nucleotides. In some embodiments, the hairpin loop can be 4-8 nucleotides.

[0249] Where the two substantially complementary strands of a dsRNA are comprised by separate RNA molecules, those molecules need not, but can be covalently connected. In certain embodiments where the two strands are connected covalently by means other than an uninterrupted chain of nucleotides between the 3′-end of one strand and the 5′-end of the respective other strand forming the duplex structure, the connecting structure is referred to as a “linker” (though it is noted that certain other structures defined elsewhere herein can also be referred to as a “linker”). The RNA strands may have the same or a different number of nucleotides. The maximum number of base pairs is the number of nucleotides in the shortest strand of the dsRNA minus any overhangs that are present in the duplex. In addition to the duplex structure, an RNAi may comprise one or more nucleotide overhangs. In one embodiment of the RNAi agent, at least one strand comprises a 3′ overhang of at least 1 nucleotide. In another embodiment, at least one strand comprises a 3′ overhang of at least 2 nucleotides, e.g., 2, 3, 4, 5, 6, 7, 9, 10, 11, 12, 13, 14, or 15 nucleotides. In other embodiments, at least one strand of the RNAi agent comprises a 5′ overhang of at least 1 nucleotide. In certain embodiments, at least one strand comprises a 5′ overhang of at least 2 nucleotides, e.g., 2, 3, 4, 5, 6, 7, 9, 10, 11, 12, 13, 14, or 15 nucleotides. In still other embodiments, both the 3′ and the 5′ end of one strand of the RNAi agent comprise an overhang of at least 1 nucleotide.

[0250] In one embodiment, an RNAi agent of the disclosure is a dsRNA, each strand of which independently comprises 19-23 nucleotides, that interacts with a target RNA sequence, e.g., an APOE target mRNA sequence, to direct the cleavage of the target RNA.

[0251] As used herein, the term “nucleotide overhang” refers to at least one unpaired nucleotide that protrudes from the duplex structure of a RNAi agent, e.g., a dsRNA. For example, when a 3′-end of one strand of a dsRNA extends beyond the 5′-end of the other strand, or vice versa, there is a nucleotide overhang. A dsRNA can comprise an overhang of at least one nucleotide; alternatively, the overhang can comprise at least two nucleotides, at least three nucleotides, at least four nucleotides, at least five nucleotides or more. A nucleotide overhang can comprise or consist of a nucleotide/nucleoside analog, including a deoxynucleotide/nucleoside. The overhang(s) can be on the sense strand, the antisense strand or any combination thereof. Furthermore, the nucleotide(s) of an overhang can be present on the 5′-end, 3′-end or both ends of either an antisense or sense strand of a dsRNA.

[0252] In one embodiment, the antisense strand of a dsRNA has a 1-10 nucleotide, e.g., a 1, 2, 3, 4, 5, 6, 7, 8, 9, or 10 nucleotide, overhang at the 3′-end or the 5′-end. In one embodiment, the sense strand of a dsRNA has a 1-10 nucleotide, e.g., a 1, 2, 3, 4, 5, 6, 7, 8, 9, or 10 nucleotide, overhang at the 3′-end or the 5′-end. In another embodiment, one or more of the nucleotides in the overhang is replaced with a nucleoside thiophosphate.

[0253] In certain embodiments, the antisense strand of a dsRNA has a 1-10 nucleotide, e.g., 0-3, 1-3, 2-4, 2-5, 4-10, 5-10, e.g., a 1, 2, 3, 4, 5, 6, 7, 8, 9, or 10 nucleotide, overhang at the 3′-end or the 5′-end. In one embodiment, the sense strand of a dsRNA has a 1-10 nucleotide, e.g., a 1, 2, 3, 4, 5, 6, 7, 8, 9, or 10 nucleotide, overhang at the 3′-end or the 5′-end. In another embodiment, one or more of the nucleotides in the overhang is replaced with a nucleoside thiophosphate.

[0254] In certain embodiments, the overhang on the sense strand or the antisense strand can include extended lengths longer than 10 nucleotides, e.g., 1-30 nucleotides, 2-30 nucleotides, 10-30 nucleotides, or 10-15 nucleotides in length. In certain embodiments, an extended overhang is on the sense strand of the duplex. In certain embodiments, an extended overhang is present on the 3′end of the sense strand of the duplex. In certain embodiments, an extended overhang is present on the 5′end of the sense strand of the duplex. In certain embodiments, an extended overhang is on the antisense strand of the duplex. In certain embodiments, an extended overhang is present on the 3′end of the antisense strand of the duplex. In certain embodiments, an extended overhang is present on the 5′end of the antisense strand of the duplex. In certain embodiments, one or more of the nucleotides in the overhang is replaced with a nucleoside thiophosphate. In certain embodiments, the overhang includes a self-complementary portion such that the overhang is capable of forming a hairpin structure that is stable under physiological conditions.

[0255] The terms “blunt” or “blunt ended” as used herein in reference to a dsRNA mean that there are no unpaired nucleotides or nucleotide analogs at a given terminal end of a dsRNA, i.e., no nucleotide overhang. One or both ends of a dsRNA can be blunt. Where both ends of a dsRNA are blunt, the dsRNA is said to be blunt ended. To be clear, a “blunt ended” dsRNA is a dsRNA that is blunt at both ends, i.e., no nucleotide overhang at either end of the molecule. Most often such a molecule will be double stranded over its entire length.

[0256] The term “antisense strand” or “guide strand” refers to the strand of a RNAi agent, e.g., a dsRNA, which includes a region that is substantially complementary to a target sequence, e.g., an APOE mRNA.

[0257] As used herein, the term “region of complementarity” refers to the region on the antisense strand that is substantially complementary to a sequence, for example a target sequence, e.g., an APOE nucleotide sequence, as defined herein. Where the region of complementarity is not fully complementary to the target sequence, the mismatches can be in the internal or terminal regions of the molecule. Generally, the most tolerated mismatches are in the terminal regions, e.g., within 5, 4, 3, or 2 nucleotides of the 5′- or 3′-terminus of the RNAi agent.

[0258] The term “sense strand” or “passenger strand” as used herein, refers to the strand of a RNAi agent that includes a region that is substantially complementary to a region of the antisense strand as that term is defined herein.

[0259] As used herein, the term “cleavage region” refers to a region that is located immediately adjacent to the cleavage site. The cleavage site is the site on the target at which cleavage occurs. In some embodiments, the cleavage region comprises three bases on either end of, and immediately adjacent to, the cleavage site. In some embodiments, the cleavage region comprises two bases on either end of, and immediately adjacent to, the cleavage site. In some embodiments, the cleavage site specifically occurs at the site bound by nucleotides 10 and 11 of the antisense strand, and the cleavage region comprises nucleotides 11, 12 and 13.

[0260] As used herein, and unless otherwise indicated, the term “complementary,” when used to describe a first nucleotide sequence in relation to a second nucleotide sequence, refers to the ability of an oligonucleotide or polynucleotide comprising the first nucleotide sequence to hybridize and form a duplex structure under certain conditions with an oligonucleotide or polynucleotide comprising the second nucleotide sequence, as will be understood by the skilled person.

[0261] Complementary sequences within a RNAi agent, e.g., within a dsRNA as described herein, include base-pairing of the oligonucleotide or polynucleotide comprising a first nucleotide sequence to an oligonucleotide or polynucleotide comprising a second nucleotide sequence over the entire length of one or both nucleotide sequences. Such sequences can be referred to as “fully complementary” with respect to each other herein. However, where a first sequence is referred to as “substantially complementary” with respect to a second sequence herein, the two sequences can be fully complementary, or they can form one or more, but generally not more than 5, 4, 3 or 2 mismatched base pairs upon hybridization for a duplex up to 30 base pairs, while retaining the ability to hybridize under the conditions most relevant to their ultimate application, e.g., inhibition of gene expression via a RISC pathway. However, where two oligonucleotides are designed to form, upon hybridization, one or more single stranded overhangs, such overhangs shall not be regarded as mismatches with regard to the determination of complementarity. For example, a dsRNA comprising one oligonucleotide 21 nucleotides in length and another oligonucleotide 23 nucleotides in length, wherein the longer oligonucleotide comprises a sequence of 21 nucleotides that is fully complementary to the shorter oligonucleotide, can yet be referred to as “fully complementary” for the purposes described herein.

[0262] “Complementary” sequences, as used herein, can also include, or be formed entirely from, non-Watson-Crick base pairs or base pairs formed from non-natural and modified nucleotides, in so far as the above requirements with respect to their ability to hybridize are fulfilled. Such non-Watson-Crick base pairs include, but are not limited to, G:U Wobble or Hoogsteen base pairing.

[0263] The terms “complementary,” “fully complementary” and “substantially complementary” herein can be used with respect to the base matching between two oligonucleotides or polynucleotides, such as the sense strand and the antisense strand of a dsRNA, or between the antisense strand of a RNAi agent and a target sequence, as will be understood from the context of their use.

[0264] As used herein, a polynucleotide that is “substantially complementary to at least part of” a messenger RNA (mRNA) refers to a polynucleotide that is substantially complementary to a contiguous portion of the mRNA of interest (e.g., an mRNA encoding APOE). For example, a polynucleotide is complementary to at least a part of an APOE mRNA if the sequence is substantially complementary to a non-interrupted portion of an mRNA encoding APOE.

[0265] Accordingly, in some embodiments, the antisense strand polynucleotides disclosed herein are fully complementary to the target APOE sequence. In other embodiments, the antisense strand polynucleotides disclosed herein are substantially complementary to the target APOE sequence and comprise a contiguous nucleotide sequence which is at least about 80% complementary over its entire length to the equivalent region of the nucleotide sequence of SEQ ID NOs: 1, 3, 5, 7, or 9 for APOE, or a fragment of SEQ ID NOs: 1, 3, 5, 7, or 9 for APOE, such as about 85%, about 86%, about 87%, about 88%, about 89%, about 90%, about 91%, about 92%, about 93%, about 94%, about 95%, about 96%, about 97%, about 98%, or about 99% complementary.

[0266] In other embodiments, the antisense polynucleotides disclosed herein are substantially complementary to the target APOE sequence and comprise a contiguous nucleotide sequence which is at least about 80% complementary over its entire length to any one of the sense strand nucleotide sequences in any one of Tables 2-5 and 7-10 for APOE, or a fragment of any one of the sense strand nucleotide sequences in any one of Tables 2-5 and 7-10 for APOE, such as about 85%, about 86%, about 87%, about 88%, about 89%, about 90%, about 91%, about 92%, about 93%, about 94%, about 95%, about 96%, about 97%, about 98%, or about 99% complementary.

[0267] In one embodiment, an RNAi agent of the disclosure includes a sense strand that is substantially complementary to an antisense polynucleotide which, in turn, is the same as a target APOE sequence, and wherein the sense strand polynucleotide comprises a contiguous nucleotide sequence which is at least about 80% complementary over its entire length to the equivalent region of the nucleotide sequence of SEQ ID NOs: 2, 4, 6, 8, or 10, or a fragment of any one of SEQ ID NOs: 2, 4, 6, 8, or 10, such as about 85%, about 86%, about 87%, about 88%, about 89%, about 90%, about 91%, about 92%, about 93%, about 94%, about 95%, about 96%, about 97%, about 98%, or about 99% complementary.

[0268] In one embodiment, at least partial suppression of the expression of an APOE gene, is assessed by a reduction of the amount of APOE mRNA which can be isolated from or detected in a first cell or group of cells in which an APOE gene is transcribed and which has or have been treated such that the expression of an APOE gene is inhibited, as compared to a second cell or group of cells substantially identical to the first cell or group of cells but which has or have not been so treated (control cells). The degree of inhibition may be expressed in terms of:

$$\frac{( mRNA in control cells ) - ( mRNA in treated cells )}{( mRNA in control cells )} \cdot 100 \%$$

[0269] The phrase “contacting a cell with an RNAi agent,” such as a dsRNA, as used herein, includes contacting a cell by any possible means. Contacting a cell with an RNAi agent includes contacting a cell in vitro with the RNAi agent or contacting a cell in vivo with the RNAi agent. The contacting may be done directly or indirectly. Thus, for example, the RNAi agent may be put into physical contact with the cell by the individual performing the method, or alternatively, the RNAi agent may be put into a situation that will permit or cause it to subsequently come into contact with the cell.

[0270] Contacting a cell in vitro may be done, for example, by incubating the cell with the RNAi agent. Contacting a cell in vivo may be done, for example, by injecting the RNAi agent into or near the tissue where the cell is located, or by injecting the RNAi agent into another area, e.g., the central nervous system (CNS), optionally via intrathecal, intravitreal or other injection, or to the bloodstream or the subcutaneous space, such that the agent will subsequently reach the tissue where the cell to be contacted is located. For example, the RNAi agent may contain or be coupled to a ligand, e.g., a lipophilic moiety or moieties as described below and further detailed, e.g., in PCT/US2019/031170, which is incorporated herein by reference, that directs or otherwise stabilizes the RNAi agent at a site of interest, e.g., the CNS. In some embodiments, the RNAi agent may contain or be coupled to a ligand, e.g., one or more GalNAc derivatives as described below, that directs or otherwise stabilizes the RNAi agent at a site of interest, e.g., the liver. In other embodiments, the RNAi agent may contain or be coupled to a lipophilic moiety or moieties and one or more GalNAc derivatives. Combinations of in vitro and in vivo methods of contacting are also possible. For example, a cell may also be contacted in vitro with an RNAi agent and subsequently transplanted into a subject.

[0271] In one embodiment, contacting a cell with an RNAi agent includes “introducing” or “delivering the RNAi agent into the cell” by facilitating or effecting uptake or absorption into the cell. Absorption or uptake of a RNAi agent can occur through unaided diffusive or active cellular processes, or by auxiliary agents or devices. Introducing a RNAi agent into a cell may be in vitro or in vivo. For example, for in vivo introduction, a RNAi agent can be injected into a tissue site or administered systemically. In vitro introduction into a cell includes methods known in the art such as electroporation and lipofection. Further approaches are described herein below or are known in the art.

[0272] The term “lipophile” or “lipophilic moiety” broadly refers to any compound or chemical moiety having an affinity for lipids. One way to characterize the lipophilicity of the lipophilic moiety is by the octanol-water partition coefficient, log K_{ow}, where K_{ow} is the ratio of a chemical's concentration in the octanol-phase to its concentration in the aqueous phase of a two-phase system at equilibrium. The octanol-water partition coefficient is a laboratory-measured property of a substance. However, it may also be predicted by using coefficients attributed to the structural components of a chemical which are calculated using first-principle or empirical methods (see, for example, Tetko et al., J. Chem. Inf Comput. Sci. 41:1407-21 (2001), which is incorporated herein by reference in its entirety). It provides a thermodynamic measure of the tendency of the substance to prefer a non-aqueous or oily milieu rather than water (i.e. its hydrophilic/lipophilic balance). In principle, a chemical substance is lipophilic in character when its log K_{ow} exceeds 0. Typically, the lipophilic moiety possesses a log K_{ow} exceeding 1, exceeding 1.5, exceeding 2, exceeding 3, exceeding 4, exceeding 5, or exceeding 10. For instance, the log K_{ow} of 6-amino hexanol, for instance, is predicted to be approximately 0.7. Using the same method, the log K_{ow} of cholesteryl N-(hexan-6-ol) carbamate is predicted to be 10.7.

[0273] The lipophilicity of a molecule can change with respect to the functional group it carries. For instance, adding a hydroxyl group or amine group to the end of a lipophilic moiety can increase or decrease the partition coefficient (e.g., log K_{ow}) value of the lipophilic moiety.

[0274] Alternatively, the hydrophobicity of the double-stranded RNAi agent, conjugated to one or more lipophilic moieties, can be measured by its protein binding characteristics. For instance, in certain embodiments, the unbound fraction in the plasma protein binding assay of the double-stranded RNAi agent could be determined to positively correlate to the relative hydrophobicity of the double-stranded RNAi agent, which could then positively correlate to the silencing activity of the double-stranded RNAi agent.

[0275] In one embodiment, the plasma protein binding assay determined is an electrophoretic mobility shift assay (EMSA) using human serum albumin protein. An exemplary protocol of this binding assay is illustrated in detail in, e.g., PCT/US2019/031170. The hydrophobicity of the double-stranded RNAi agent, measured by fraction of unbound dsRNA in the binding assay, exceeds 0.15, exceeds 0.2, exceeds 0.25, exceeds 0.3, exceeds 0.35, exceeds 0.4, exceeds 0.45, or exceeds 0.5 for an enhanced in vivo delivery of dsRNA.

[0276] Accordingly, conjugating the lipophilic moieties to the internal position(s) of the double-stranded RNAi agent provides optimal hydrophobicity for the enhanced in vivo delivery of siRNA.

[0277] The term “lipid nanoparticle” or “LNP” is a vesicle comprising a lipid layer encapsulating a pharmaceutically active molecule, such as a nucleic acid molecule, e.g., a rNAi agent or a plasmid from which a RNAi agent is transcribed. LNPs are described in, for example, U.S. Pat. Nos. 6,858,225, 6,815,432, 8,158,601, and 8,058,069, the entire contents of which are hereby incorporated herein by reference.

[0278] As used herein, a “subject” is an animal, such as a mammal, including a primate (such as a human, a non-human primate, e.g., a monkey, and a chimpanzee), or a non-primate (such as a a rat, or a mouse). In a preferred embodiment, the subject is a human, such as a human being treated or assessed for a disease, disorder, or condition that would benefit from reduction in APOE expression; a human at risk for a disease, disorder, or condition that would benefit from reduction in APOE expression; a human having a disease, disorder, or condition that would benefit from reduction in APOE expression; or human being treated for a disease, disorder, or condition that would benefit from reduction in APOE expression as described herein.

[0279] As used herein, the terms “treating” or “treatment” refer to a beneficial or desired result including, but not limited to, alleviation or amelioration of one or more signs or symptoms associated with APOE gene expression or APOE protein production, e.g., APOE-associated neurodegenerative disease, such as an amyloid-β-mediated disease, e.g. Alzheimer's disease, Down's syndrome, and cerebral amyloid angiopathy, or a tau-mediated disease, e.g. a primary tauopathy, such as frontotemporal dementia, Progressive supranuclear palsy (PSP), Cordicobasal degeneration (CBD), Pick's disease (PiD), Chronic traumatic encelopathy (CTE), Frontotemporal dementia (FTD, FTDP-17), Frontotemporal lobar degeneration (FTLD), Argyrophilic grain disease (AGD), Primary age-related tauopathy (PART), and Globular glial tauopathies (GGTs), or a secondary tauopathy, e.g., AD, Creuzfeld Jakob's disease, Down's Syndrome, Familial British Dementia, and Dementia pugilistica. Treatment” can also mean prolonging survival as compared to expected survival in the absence of treatment.

[0280] The term “lower” in the context of the level of APOE in a subject or a disease marker or symptom refers to a statistically significant decrease in such level. The decrease can be, for example, at least 10%, 15%, 20%, 25%, 30%, %, 40%, 45%, 50%, 55%, 60%, 65%, 70%, 75%, 80%, 85%, 90%, 95%, or more. In certain embodiments, a decrease is at least 20%. In certain embodiments, the decrease is at least 50% in a disease marker, e.g., protein or gene expression level. “Lower” in the context of the level of APOE in a subject is preferably down to a level accepted as within the range of normal for an individual without such disorder. In certain embodiments, “lower” is the decrease in the difference between the level of a marker or symptom for a subject suffering from a disease and a level accepted within the range of normal for an individual, e.g., the level of decrease in bodyweight between an obese individual and an individual having a weight accepted within the range of normal. As used herein, lowering can refer to lowering or predominantly lowering the level of mRNA of an APOE gene having a nucleotide repeat expansion.

[0281] As used herein, “prevention” or “preventing,” when used in reference to a disease, disorder, or condition thereof, that would benefit from a reduction in expression of an APOE gene or production of an APOE protein, refers to a reduction in the likelihood that a subject will develop a symptom associated with such a disease, disorder, or condition, e.g., a symptom of an APOE-associated neurodegenerative disease. The failure to develop a disease, disorder, or condition, or the reduction in the development of a symptom associated with such a disease, disorder, or condition (e.g., by at least about 10% on a clinically accepted scale for that disease or disorder), or the exhibition of delayed symptoms delayed (e.g., by days, weeks, months or years) is considered effective prevention.

[0282] As used herein, the term “APOE-associated neurodegenerative disease” or “APOE-associated neurodegenerative disorder” is understood as any disease or disorder that would benefit from reduction in the expression and/or activity of APOE. Exemplary APOE-associated neurodegenerative diseases include amyloid-β-mediated diseases, such as, Alzheimer's's disease, Down's syndrome, and cerebral amyloid angiopathy, and tau-mediated diseases, e.g. primary tauopathies, such as Frontotemporal dementia (FTD), Progressive supranuclear palsy (PSP), Cordicobasal degeneration (CBD), Pick's disease (PiD), Globular glial tauopathies (GGTs), frontotemporal dementia with parkinsonism (FTDP, FTDP-17), Chronic traumatic encelopathy (CTE), Dementia pugilistica, Frontotemporal lobar degeneration (FTLD), Argyrophilic grain disease (AGD), and Primary age-related tauopathy (PART), and secondary tauopathies, e.g., AD, Creuzfeld Jakob's disease, Down's Syndrome, and Familial British Dementia.

[0283] As used herein, the term “amyloid-β-mediated disease” is a disorder resulting from extracellular accumulation of amyloid-β, which leads to formation of amyloid plaques in brain tissue. Exemplary amyloid-β-mediated diseases include Alzheimer's disease, Down's syndrome, and cerebral amyloid angiopathy (CAA).

[0284] As used herein, the term “tau-mediated disease” is a disorder resulting from the aggregation of tau protein into neurofibrillary tangles. Tangles are formed by hyperphosphorylation of tau, causing the protein to dissociate from microtubules and from aggregates. Tauopathies can be divided into “primary tauopathies”, in which the pathology is driven primarily by tau aggregation, and “secondary tauopathies”, in which another factor drives the disease (for example, amyloid-β plaques in Alzheimer's disease) and the presence of tauopathies worsens disease progression. Examples of primary tauopathies include Frontotemporal dementia (FTD) Progressive supranuclear palsy (PSP), Cordicobasal degeneration (CBD), Pick's disease (PiD), Globular glial tauopathies (GGTs), Frontotemporal dementia with parkinsonism (FTDP, FTDP-17), Chronic traumatic encelopathy (CTE), Dementia pugilistica Argyrophilic grain disease (AGD), and Primary age-related tauopathy (PART). Examples of secondary tauopathies include AD, Creuzfeld Jakob's disease, Down's Syndrome and Familial British Dementia.

[0285] APOE polymorphism has been associated with multiple tauopathies. The APOE4 allele was found to accelerate neurodegeneration and lower age at onset in frontotemporal dementia (FTD) in patients with MAPT mutations (Koriath, C. et al. (2019) Alzheimers Dement 11:277-280). In addition, the presence of APOE4 correlated with more advanced chronic traumatic encephalopathy (CTE) in autopsy brains of football players with low exposure of repetitive head impacts (Verscaj, C. et al. (2017) Neurology 88 (16) Supplement S9.001) and in brains of boxers (Jordan, B. D. et al. (1997) JAMA 278(2): 136-140). The presence f the APOE4 allele is also associated with increased risk of Creutzfeldt-Jakob disease (CJD) while the presence of the APOE3 allele is associated with protection against susceptibility to Creutzfeldt-Jakob disease (CJD) (Wei, Y. et al. (2013) J Clinical Neuroscience 21(3): 390-394).

[0286] Furthermore, Shi et al. described that in the P301S mouse model of FTD, when APOE4 was present there was a marked increase in tau levels, brain atrophy and neuroinflammation as compared the when APOE2, APOE3 or an APOE knockout were present (Shi et al., (2017) Nature 549: 523-527). In another studying using a mouse model that expresses human tau with the P301L mutation found in FTD with parkinsonism, hyperphosphorylated tau, tau aggregation, behavioral abnormalities were worsened on an APOE2 background (Zhao, N. et al., (2018) Nat Commun 9:4388). Zhao et al. further identified an association between the APOE ε2/ε2 genotype with risk of tauopathies in confirmed cases of progressive supranuclear palsy (PSP) and corticobasal degeneration, suggesting that APOE2 might be protective in when amyloid pathology is present, APOE2 is related to increased severity of tau pathology in the absence of amyloid pathology.

[0287] “Alzheimer's disease” (“AD”) is a chronic neurodegenerative disease that usually starts slowly and gradually worsens over time. The most common early symptom is difficulty in remembering recent events. As the disease advances, symptoms can include problems with language, disorientation (including easily getting lost), mood swings, loss of motivation, not managing self-care, and behavioral issues. As a person's condition declines, they often withdraw from family and society. Gradually, bodily functions are lost, ultimately leading to death.

[0288] Neuropathologically, AD is characterised by loss of neurons and synapses in the cerebral cortex and certain subcortical regions. This loss results in gross atrophy of the affected regions, including degeneration in the temporal lobe and parietal lobe, and parts of the frontal cortex and cingulate gyrus. Degeneration is also present in brainstem nuclei like the locus coeruleus. Studies using MRI and PET have documented reductions in the size of specific brain regions in people with AD as they progressed from mild cognitive impairment to Alzheimer's disease, and in comparison with similar images from healthy older adults.

[0289] Both amyloid plaques and neurofibrillary tangles are clearly visible by microscopy in brains of those afflicted by AD. Plaques are dense, mostly insoluble deposits of beta-amyloid peptide and cellular material outside and around neurons. Tangles (neurofibrillary tangles) are aggregates of the microtubule-associated protein tau which has become hyperphosphorylated and accumulate inside the cells themselves. Although many older individuals develop some plaques and tangles as a consequence of ageing, the brains of people with AD have a greater number of them in specific brain regions such as the temporal lobe. Lewy bodies are not rare in the brains of people with AD.

[0290] The National Institute of Neurological and Communicative Disorders and Stroke (NINCDS) and the Alzheimer's Disease and Related Disorders Association (ADRDA, now known as the Alzheimer's Association) established the most commonly used NINCDS-ADRDA Alzheimer's Criteria for diagnosis in 1984, extensively updated in 2007. These criteria require that the presence of cognitive impairment, and a suspected dementia syndrome, be confirmed by neuropsychological testing for a clinical diagnosis of possible or probable AD. A histopathologic confirmation including a microscopic examination of brain tissue is required for a definitive diagnosis. Good statistical reliability and validity have been shown between the diagnostic criteria and definitive histopathological confirmation. Eight intellectual domains are most commonly impaired in AD-memory, language, perceptual skills, attention, motor skills, orientation, problem solving and executive functional abilities. These domains are equivalent to the NINCDS-ADRDA Alzheimer's Criteria as listed in the Diagnostic and Statistical Manual of Mental Disorders (DSM-IV-TR) published by the American Psychiatric Association.

[0291] At present, drugs available to treat AD patients include cholinesterase inhibitors and memantine. These drugs can improve quality of life of patients by treating symptoms related to, for example, memory, thinking, and language, however, they do not change the progression of the disease or the rate of decline.

[0292] The cause of AD is poorly understood but, as discussed above, the presence of APOE4 has shown to be a major risk determinant of late-onset Alzheimer's disease (AD), the symptoms of which develop after age 65, and numerous studies in non-human animal models of amyloid-β-mediated disease (AD) and tau-mediated disease have demonstrated that inhibiting APOE, e.g., APOE4, has a beneficial effect on the formation of amyloid plaques and cognitive abilities.

[0293] “Down's syndrome” (“DS”), also known as trisomy 21, is a genetic order caused by the presence of all or part of a third copy of chromosome 21. DS is a life-long condition associated with intellectual disability, a characteristic facial appearance, weak muscle tone in infancy, and people with DS often experience a gradual decline in cognitive ability. The third chromosome 21 carries an extra amyloid precursor protein (APP) gene, and excess amyloid production leading to buildup of amyloid-β plaques and consequently increased risk of early-onset Alzheimer's disease (AD) to more than 50%. Another gene that is triplicated in DS is DYRK1A, which affects alternative splicing of tau, priming tau for abnormal hyperphosphorylation and promote neurofibrillary degeneration (Hartley D. et al. (2016) Alzheimers Dement 11(6): 700-709). DS individuals with AD have neuropathological changes similar to general AD patients, including amyloid plaques, tau neurofibrillary tangles, oxidative damage, and neuron loss. Elevated levels of both amyloid and tau are found in cerebrospinal fluid of DS individuals (Lee, N.C. et al. (2017) Neurology and Therapy 6: 69-81).

[0294] “Cerebral amyloid angiopathy” (“CAA”) is a form of angiopathy in which amyloid plaques are deposited in the walls of small to medium blood vessels and certain areas of the brain. The amyloid plaques damage brain cells and impair various parts of the brain. In addition, the amyloid deposits in blood vessels replace the muscle and elastic fibers that give the blood vessels flexibility, causing them to become prone to breakage. CAA may lead to dementia, intracranial hemorrhage and transient neurologic events. CAA has been recognized as one of the morphologic hallmarks of Alzheimer's disease. Mutations in the amyloid-β precursor protein (APP) gene are the most common cause of hereditary CAA (Desimone C. V. et al. (2017) J Am Coll Cardiol 70(9): 1173-1182).

[0295] “Frontotemporal dementia” (“FTD”), which encompasses diseases such as Pick's disease, Progressive supranuclear palsy (PSP), and Cordicobasal denegearion (CBD). FTD is a common type of dementia in patients younger than 65 years of age and encompasses a group of neurodegenerative diseases characterized by progressive decline in behavior, executive function, or language. In FTD, nerve cells in the frontal and temporal lobes of the brain are lost, and therefore FTD is also called Frontotemporal lobar degeneration (FTLD). Mutations in the microtubule-associated protein tau (MAPT) gene and accumulation of tau are found in several subtypes of FTD, including Pick's disease, Progressive supranuclear palsy (PSP), and Cordicobasal denegearion (CBD).

[0296] “Pick's disease” is characterized by striking knife-edge atrophy of frontal, temporal, and cingulate gyri where the parietal lobe is better preserved.

[0297] “Corticobasal degeneration” (“CBD”) is characterized by predominant loss of cells in the dorsal prefrontal cortex, supplemental motor area, peri-Rolandic cortex, and subcortical nuclei.

[0298] “Progressive supranuclear palsy” (“PSP”) is associated with atrophy of the frontal convexity; subcortical atrophy is severe at the level of globus pallidus, subthalamic nucleus, and brainstem nuclei (Olney, N. T. et al. (2017) Neurol Clin 35(2): 339-374).

[0299] “Globular glial tauopathies” (“GGTs”) are a type of rare frontotemporal lobar degeneration (FLD) that have widespread, globular inclusions in astrocytes and oligodendrocytes containing the 4-repeat tau isoform. These cases are associated with a range of clinical presentations that correlate with the severity and distribution of underlying tau pathology and neurodegeneration (Ahmed, Z. et al. (2013) Acta Neuropathol 126(4): 537-544).

[0300] “Frontotemporal dementia with parkinsonism” (“FTDP”) is a less common type of FTD that also affects movement. Chromosome 17 was found be linked to FTDP (FTDP-17) and mutations on the microtubule-associated protein tau (MAPT) on chromosome 17 were found in many kindreds with familial FTDP-17. FTDP-17 due to mutations in MAPT starts between 25-65 years of age, and penetrance is close to 100%. Symptoms involve executive dysfunction and altered personality and behavior with aphasia and parkinsonism evolving in many individuals (Boeve, B. F. et al. (2008) Arch Neurol 65(4): 460-464).

[0301] “Chronic traumatic encephalopathy” (“CTE”) is a debilitating neurodegenerative disease resulting from repetitive mild traumatic brain injuries found in many athletes, especially football players. The neuropathological signature of CTE includes accumulation of phosphorylated tau in sulci and peri-vascular regions, microgliosis, and astrocytosis; from some tau deposits at early stage, the disease can progress to global brain atrophy at late stage. CTE can progress through many years from mild symptoms such as short-term memory deficits and mild aggression to advanced language deficits and psychotic symptoms including paranoia and parkinsonism (Fesharaki-Zadeh, A. (2019) Front Neurol 10:713).

[0302] “Dementia pugilistica” is a form of CTE that involves gross impairment of cognitive and motor functions due to repetitive blows to the head from boxing (Castellani. R. J et al. (2017) J Alzheimers Dis 60(4): 1209-1221).

[0303] “Argyrophilic grain disease” (“AGD”) is a highly frequent sporadic tauopathy and the second-most-common neurodegenerative disease after Alzheimer's disease in several studies. AGD is a late-onset neurodegenerative disease characterized by small spindle- or comma-shaped, silver stain positive lesions in neuronal processes referred to as argyrophilic grains (AG). Phosphorylated-tau is a major component of AG. The most common AGD manifestation is slowly progressive, amnestic and mild cognitive impairment, accompanied by a high prevalence of neuropsychiatric symptoms. Due to the lack of prominent clinical features, AGD is often only diagnosed postmortem based on three pathologic features: AG, oligodendrocytic coiled bodies and neuronal tangles (Rodriguez, R. D. et al. (2015) Dement Neuropsychol 9(1): 2-8).

[0304] “Primary age-related tauopathy” (“PART”) is a pathology commonly observed postmortem in the brains of aged individuals whose cognitive functions are normal or only mildly impaired. PART brains have tau neurofibrillary tangles indistinguishable from that of Alzheimer's disease but do not have amyloid-β plaques (Crary, J. F. et al. (2014) Acta Neuropathol 128(6): 755-66).

[0305] “Creuzfeld Jakob's disease” (“CJD”) belongs to a family of human and animal diseases known as the transmissible spongiform encephalopathies (TSEs) or prion diseases. A prion-derived from “protein” and “infectious”—causes CJD in people and TSEs in animals. Spongiform refers to the characteristic appearance of infected brains, which become filled with holes until they resemble sponges when examined under a microscope. CJD is a rare, degenerative and fatal brain disorder, usually appears in later life and runs a rapid course. Typical onset of symptoms occurs at about age 60, and about 70 percent of individuals die within one year. In the early stages of the disease, people may have failing memory, behavioral changes, lack of coordination, and visual disturbances. As the illness progresses, mental deterioration becomes pronounced and involuntary movements, blindness, weakness of extremities, and coma may occur. In addition to prion plaques, tau pathology is also observed in several brain regions of CJD patients, and the cerebrospinal fluid of patients with widespread taupathology also has elevated total tau protein (Kovacs, G. G et al. (2017) Brain Pathol 3: 332-344).

[0306] “Familial British dementia” (“FBD”) is a type of cerebral amyloid angiopathy that was first documented in affected members of a large British pedigree with clinical presentations including dementia, spastic tetreparesis and cerebellar ataxia. FBD is caused by a mutation in the BRI2 gene. Amyloid plaques in FBD are made up of amyloid-Bri, and tau positive neurofibrillary tangles are found in areas affected by amyloid-Bri lesions. Immunoblotting of tau in FBD is similar to the patterns of tau in Alzheimer's disease (Holton J. L. et al. (2001) Am J Patho 2: 515-526).

[0307] “Therapeutically effective amount,” as used herein, is intended to include the amount of an RNAi agent that, when administered to a subject having an APOE-associated neurodegenerative disease, is sufficient to effect treatment of the disease (e.g., by diminishing, ameliorating, or maintaining the existing disease or one or more symptoms of disease). The “therapeutically effective amount” may vary depending on the RNAi agent, how the agent is administered, the disease and its severity and the history, age, weight, family history, genetic makeup, the types of preceding or concomitant treatments, if any, and other individual characteristics of the subject to be treated.

[0308] “Prophylactically effective amount,” as used herein, is intended to include the amount of a RNAi agent that, when administered to a subject having an APOE-associated neurodegenerative disorder, is sufficient to prevent or ameliorate the disease or one or more symptoms of the disease. Ameliorating the disease includes slowing the course of the disease or reducing the severity of later-developing disease. The “prophylactically effective amount” may vary depending on the RNAi agent, how the agent is administered, the degree of risk of disease, and the history, age, weight, family history, genetic makeup, the types of preceding or concomitant treatments, if any, and other individual characteristics of the patient to be treated.

[0309] A “therapeutically-effective amount” or “prophylactically effective amount” also includes an amount of a RNAi agent that produces some desired local or systemic effect at a reasonable benefit/risk ratio applicable to any treatment. A RNAi agent employed in the methods of the present disclosure may be administered in a sufficient amount to produce a reasonable benefit/risk ratio applicable to such treatment.

[0310] The phrase “pharmaceutically acceptable” is employed herein to refer to those compounds, materials, compositions, or dosage forms which are, within the scope of sound medical judgment, suitable for use in contact with the tissues of human subjects and animal subjects without excessive toxicity, irritation, allergic response, or other problem or complication, commensurate with a reasonable benefit/risk ratio.

[0311] The phrase “pharmaceutically-acceptable carrier” as used herein means a pharmaceutically-acceptable material, composition or vehicle, such as a liquid or solid filler, diluent, excipient, manufacturing aid (e.g., lubricant, talc magnesium, calcium or zinc stearate, or steric acid), or solvent encapsulating material, involved in carrying or transporting the subject compound from one organ, or portion of the body, to another organ, or portion of the body. Each carrier must be “acceptable” in the sense of being compatible with the other ingredients of the formulation and not injurious to the subject being treated. Some examples of materials which can serve as pharmaceutically-acceptable carriers include: (1) sugars, such as lactose, glucose and sucrose; (2) starches, such as corn starch and potato starch; (3) cellulose, and its derivatives, such as sodium carboxymethyl cellulose, ethyl cellulose and cellulose acetate; (4) powdered tragacanth; (5) malt; (6) gelatin; (7) lubricating agents, such as magnesium state, sodium lauryl sulfate and talc; (8) excipients, such as cocoa butter and suppository waxes; (9) oils, such as peanut oil, cottonseed oil, safflower oil, sesame oil, olive oil, corn oil and soybean oil; (10) glycols, such as propylene glycol; (11) polyols, such as glycerin, sorbitol, mannitol and polyethylene glycol; (12) esters, such as ethyl oleate and ethyl laurate; (13) agar; (14) buffering agents, such as magnesium hydroxide and aluminum hydroxide; (15) alginic acid; (16) pyrogen-free water; (17) isotonic saline; (18) Ringer's solution; (19) ethyl alcohol; (20) pH buffered solutions; (21) polyesters, polycarbonates or polyanhydrides; (22) bulking agents, such as polypeptides and amino acids (23) serum component, such as serum albumin, HDL and LDL; and (22) other non-toxic compatible substances employed in pharmaceutical formulations.

[0312] The term “sample,” as used herein, includes a collection of similar fluids, cells, or tissues isolated from a subject, as well as fluids, cells, or tissues present within a subject. Examples of biological fluids include blood, serum and serosal fluids, plasma, cerebrospinal fluid, ocular fluids, lymph, urine, saliva, and the like. Tissue samples may include samples from tissues, organs or localized regions. For example, samples may be derived from particular organs, parts of organs, or fluids or cells within those organs. In certain embodiments, samples may be derived from the brain (e.g., whole brain or certain segments of brain, e.g., striatum, or certain types of cells in the brain, such as, e.g., neurons and glial cells (astrocytes, oligodendrocytes, microglial cells)). In other embodiments, a “sample derived from a subject” refers to liver tissue (or subcomponents thereof) derived from the subject. In some embodiments, a “sample derived from a subject” refers to blood drawn from the subject or plasma or serum derived therefrom. In further embodiments, a “sample derived from a subject” refers to brain tissue (or subcomponents thereof) or retinal tissue (or subcomponents thereof) derived from the subject.

### II. RNAi Agents of the Disclosure

[0313] Described herein are RNAi agents which inhibit the expression of an APOE gene. In some embodiments, the RNAi agents provided herein inhibit the expression of an APOE2 allele, an APOE3 allele, and an APOE4 allele. In other embodiments, the RNAi agent provided herein inhibit the expression of an APOE4 allele, e.g., the RNAi agents do not substantially inhibit the expression of an APOE2 allele or an APOE3 allele, e.g., the inhibition of APOE2 and/or APOE3 expression is no more than about 10%. In one embodiment, the RNAi agent includes double stranded ribonucleic acid (dsRNA) molecules for inhibiting the expression of an APOE gene in a cell, such as a cell within a subject, e.g., a mammal, such as a human having an APOE-associated neurodegenerative disease e.g., an amyloid-β-mediated disease, such as, Alzheimer's's disease, Down's syndrome, and cerebral amyloid angiopathy, and tau-mediated diseases, e.g. a primary tauopathy, such as Frontotemporal dementia (FTD), Progressive supranuclear palsy (PSP), Cordicobasal degeneration (CBD), Pick's disease (PiD), Globular glial tauopathies (GGTs), frontotemporal dementia with parkinsonism (FTDP, FTDP-17), Chronic traumatic encelopathy (CTE), Dementia pugilistica, Frontotemporal lobar degeneration (FTLD), Argyrophilic grain disease (AGD), and Primary age-related tauopathy (PART), or a secondary tauopathy, e.g., AD, Creuzfeld Jakob's disease, Down's Syndrome, and Familial British Dementia. The dsRNA includes an antisense strand having a region of complementarity which is complementary to at least a part of an mRNA formed in the expression of an APOE gene, The region of complementarity is about 15-30 nucleotides or less in length. Upon contact with a cell expressing the APOE gene, the RNAi agent inhibits the expression of the APOE gene (e.g., a human gene, a primate gene, a non-primate gene) by at least 50% as assayed by, for example, a PCR or branched DNA (bDNA)-based method, or by a protein-based method, such as by immunofluorescence analysis, using, for example, western blotting or flowcytometric techniques. In one embodiment, the level of knockdown is assayed at a 10 nM concentration of siRNA in human neuroblastoma BE(2)-C cells using a Dual-Luciferase assay method provided in Example 1 below.

[0314] A dsRNA includes two RNA strands that are complementary and hybridize to form a duplex structure under conditions in which the dsRNA will be used. One strand of a dsRNA (the antisense strand) includes a region of complementarity that is substantially complementary, and generally fully complementary, to a target sequence. The target sequence can be derived from the sequence of an mRNA formed during the expression of an APOE gene. The other strand (the sense strand) includes a region that is complementary to the antisense strand, such that the two strands hybridize and form a duplex structure when combined under suitable conditions. As described elsewhere herein and as known in the art, the complementary sequences of a dsRNA can also be contained as self-complementary regions of a single nucleic acid molecule, as opposed to being on separate oligonucleotides.

[0315] Generally, the duplex structure is 15 to 30 base pairs in length, e.g., 15-29, 15-28, 15-27, 15-26, 15-25, 15-24, 15-23, 15-22, 15-21, 15-20, 15-19, 15-18, 15-17, 18-30, 18-29, 18-28, 18-27, 18-26, 18-25, 18-24, 18-23, 18-22, 18-21, 18-20, 19-30, 19-29, 19-28, 19-27, 19-26, 19-25, 19-24, 19-23, 19-22, 19-21, 19-20, 20-30, 20-29, 20-28, 20-27, 20-26, 20-25, 20-24, 20-23, 20-22, 20-21, 21-30, 21-29, 21-28, 21-27, 21-26, 21-25, 21-24, 21-23, or 21-22 base pairs in length. In certain preferred embodiments, the duplex structure is 18 to 25 base pairs in length, e.g., 18-25, 18-24, 18-23, 18-22, 18-21, 18-20, 19-25, 19-24, 19-23, 19-22, 19-21, 19-20, 20-25, 20-24, 20-23, 20-22, 20-21, 21-25, 21-24, 21-23, 21-22, 22-25, 22-24, 22-23, 23-25, 23-24 or 24-25 base pairs in length, for example, 19-21 basepairs in length. Ranges and lengths intermediate to the above recited ranges and lengths are also contemplated to be part of the disclosure.

[0316] Similarly, the region of complementarity to the target sequence is 15 to 30 nucleotides in length, e.g., 15-29, 15-28, 15-27, 15-26, 15-25, 15-24, 15-23, 15-22, 15-21, 15-20, 15-19, 15-18, 15-17, 18-30, 18-29, 18-28, 18-27, 18-26, 18-25, 18-24, 18-23, 18-22, 18-21, 18-20, 19-30, 19-29, 19-28, 19-27, 19-26, 19-25, 19-24, 19-23, 19-22, 19-21, 19-20, 20-30, 20-29, 20-28, 20-27, 20-26, 20-25, 20-24,20-23, 20-22, 20-21, 21-30, 21-29, 21-28, 21-27, 21-26, 21-25, 21-24, 21-23, or 21-22 nucleotides in length, for example 19-23 nucleotides in length or 21-23 nucleotides in length. Ranges and lengths intermediate to the above recited ranges and lengths are also contemplated to be part of the disclosure.

[0317] In some embodiments, the dsRNA is 15 to 23 nucleotides in length, or 25 to 30 nucleotides in length. In general, the dsRNA is long enough to serve as a substrate for the Dicer enzyme. For example, it is well known in the art that dsRNAs longer than about 21-23 nucleotides can serve as substrates for Dicer. As the ordinarily skilled person will also recognize, the region of an RNA targeted for cleavage will most often be part of a larger RNA molecule, often an mRNA molecule. Where relevant, a “part” of an mRNA target is a contiguous sequence of an mRNA target of sufficient length to allow it to be a substrate for RNAi-directed cleavage (i.e., cleavage through a RISC pathway).

[0318] One of skill in the art will also recognize that the duplex region is a primary functional portion of a dsRNA, e.g., a duplex region of about 15 to 36 base pairs, e.g., 15-36, 15-35, 15-34, 15-33, 15-32, 15-31, 15-30, 15-29, 15-28, 15-27, 15-26, 15-25, 15-24, 15-23, 15-22, 15-21, 15-20, 15-19, 15-18, 15-17, 18-30, 18-29, 18-28, 18-27, 18-26, 18-25, 18-24, 18-23, 18-22, 18-21, 18-20, 19-30, 19-29, 19-28, 19-27, 19-26, 19-25, 19-24, 19-23, 19-22, 19-21, 19-20, 20-30, 20-29, 20-28, 20-27, 20-26, 20-25, 20-24, 20-23, 20-22, 20-21, 21-30, 21-29, 21-28, 21-27, 21-26, 21-25, 21-24, 21-23, or 21-22 base pairs, for example, 19-21 base pairs. Thus, in one embodiment, to the extent that it becomes processed to a functional duplex, of e.g., 15-30 base pairs, that targets a desired RNA for cleavage, an RNA molecule or complex of RNA molecules having a duplex region greater than 30 base pairs is a dsRNA. Thus, an ordinarily skilled artisan will recognize that in one embodiment, a miRNA is a dsRNA. In another embodiment, a dsRNA is not a naturally occurring miRNA. In another embodiment, a RNAi agent useful to target APOE expression is not generated in the target cell by cleavage of a larger dsRNA.

[0319] A dsRNA as described herein can further include one or more single-stranded nucleotide overhangs e.g., 1, 2, 3, or 4 nucleotides. A nucleotide overhang can comprise or consist of a nucleotide/nucleoside analog, including a deoxynucleotide/nucleoside. The overhang(s) can be on the sense strand, the antisense strand or any combination thereof. Furthermore, the nucleotide(s) of an overhang can be present on the 5′-end, 3′-end or both ends of either an antisense or sense strand of a dsRNA.

[0320] A dsRNA can be synthesized by standard methods known in the art.

[0321] In one aspect, a dsRNA of the disclosure includes at least two nucleotide sequences, a sense sequence and an antisense sequence. The sense strand sequence for APOE may be selected from the group of sequences provided in any one of Tables 2-5 and 7-10, and the corresponding nucleotide sequence of the antisense strand of the sense strand may be selected from the group of sequences of any one of Tables 2-5 and 7-10. In this aspect, one of the two sequences is complementary to the other of the two sequences, with one of the sequences being substantially complementary to a sequence of an mRNA generated in the expression of an APOE gene. As such, in this aspect, a dsRNA will include two oligonucleotides, where one oligonucleotide is described as the sense strand (passenger strand) in any one of Tables 2-5 and 7-10, and the second oligonucleotide is described as the corresponding antisense strand (guide strand) of the sense strand in any one of Tables 2-5 and 7-10 for APOE.

[0322] In one embodiment, the substantially complementary sequences of the dsRNA are contained on separate oligonucleotides. In another embodiment, the substantially complementary sequences of the dsRNA are contained on a single oligonucleotide.

[0323] It will be understood that, although the sequences in Tables 3, 5, 8, and 10 are described as modified or conjugated sequences and the sequences in Tables 2, 4, 7, and 9 are described as unmodified, the RNA of the RNAi agent of the disclosure e.g., a dsRNA of the disclosure, may comprise any one of the sequences set forth in any one of Tables 2-5 and 7-10 that is un-modified, un-conjugated, or modified or conjugated differently than described therein. One or more lipophilic ligands and/or one or more GalNAc ligands can be included in any of the positions of the RNAi agents provided in the instant application.

[0324] The skilled person is well aware that dsRNAs having a duplex structure of about 20 to 23 base pairs, e.g., 21, base pairs have been hailed as particularly effective in inducing RNA interference (Elbashir et al., (2001) EMBO J., 20:6877-6888). However, others have found that shorter or longer RNA duplex structures can also be effective (Chu and Rana (2007) RNA 14:1714-1719; Kim et al. (2005) Nat Biotech 23:222-226). In the embodiments described above, by virtue of the nature of the oligonucleotide sequences provided herein, dsRNAs described herein can include at least one strand of a length of minimally 21 nucleotides. It can be reasonably expected that shorter duplexes minus only a few nucleotides on one or both ends can be similarly effective as compared to the dsRNAs described above. Hence, dsRNAs having a sequence of at least 15, 16, 17, 18, 19, 20, or more contiguous nucleotides derived from one of the sequences provided herein, and differing in their ability to inhibit the expression of an APOE gene by not more than 10, 15, 20, 25, or 30% inhibition from a dsRNA comprising the full sequence using the in vitro assay with Cos 7 and a 10 nM concentration of the RNA agent and the PCR assay as provided in the examples herein, are contemplated to be within the scope of the present disclosure.

[0325] In addition, the RNAs described herein identify a site(s) in an APOE transcript that is susceptible to RISC-mediated cleavage. As such, the present disclosure further features RNAi agents that target within this site(s). As used herein, a RNAi agent is said to target within a particular site of an RNA transcript if the RNAi agent promotes cleavage of the transcript anywhere within that particular site. Such a RNAi agent will generally include at least about 15 contiguous nucleotides, preferably at least 19 nucleotides, from one of the sequences provided herein coupled to additional nucleotide sequences taken from the region contiguous to the selected sequence in an APOE gene.

[0326] An RNAi agent as described herein can contain one or more mismatches to the target sequence. In one embodiment, an RNAi agent as described herein contains no more than 3 mismatches (i.e., 3, 2, 1, or 0 mismatches). In one embodiment, an RNAi agent as described herein contains no more than 2 mismatches. In one embodiment, an RNAi agent as described herein contains no more than 1 mismatch. In one embodiment, an RNAi agent as described herein contains 0 mismatches. In certain embodiments, if the antisense strand of the RNAi agent contains mismatches to the target sequence, the mismatch can optionally be restricted to be within the last 5 nucleotides from either the 5′- or 3′-end of the region of complementarity. For example, in such embodiments, for a 23 nucleotide RNAi agent, the strand which is complementary to a region of an APOE gene generally does not contain any mismatch within the central 13 nucleotides. The methods described herein or methods known in the art can be used to determine whether an RNAi agent containing a mismatch to a target sequence is effective in inhibiting the expression of an APOE gene. Consideration of the efficacy of RNAi agents with mismatches in inhibiting expression of an APOE gene is important, especially if the particular region of complementarity in an APOE gene is known to have polymorphic sequence variation within the population.

### III. Modified RNAi Agents of the Disclosure

[0327] In one embodiment, the RNA of the RNAi agent of the disclosure e.g., a dsRNA, is un-modified, and does not comprise, e.g., chemical modifications or conjugations known in the art and described herein. In preferred embodiments, the RNA of an RNAi agent of the disclosure, e.g., a dsRNA, is chemically modified to enhance stability or other beneficial characteristics. In certain embodiments of the disclosure, substantially all of the nucleotides of an RNAi agent of the disclosure are modified. In other embodiments of the disclosure, all of the nucleotides of an RNAi agent of the disclosure are modified. RNAi agents of the disclosure in which “substantially all of the nucleotides are modified” are largely but not wholly modified and can include not more than 5, 4, 3, 2, or 1 unmodified nucleotides. In still other embodiments of the disclosure, RNAi agents of the disclosure can include not more than 5, 4, 3, 2 or 1 modified nucleotides.

[0328] The nucleic acids featured in the disclosure can be synthesized or modified by methods well established in the art, such as those described in “Current protocols in nucleic acid chemistry,” Beaucage, S. L. et al. (Edrs.), John Wiley & Sons, Inc., New York, N.Y., USA, which is hereby incorporated herein by reference. Modifications include, for example, end modifications, e.g., 5′-end modifications (phosphorylation, conjugation, inverted linkages) or 3′-end modifications (conjugation, DNA nucleotides, inverted linkages, etc.); base modifications, e.g., replacement with stabilizing bases, destabilizing bases, or bases that base pair with an expanded repertoire of partners, removal of bases (abasic nucleotides), or conjugated bases; sugar modifications (e.g., at the 2′-position or 4′-position) or replacement of the sugar; or backbone modifications, including modification or replacement of the phosphodiester linkages. Specific examples of RNAi agents useful in the embodiments described herein include, but are not limited to, RNAs containing modified backbones or no natural internucleoside linkages. RNAs having modified backbones include, among others, those that do not have a phosphorus atom in the backbone. For the purposes of this specification, and as sometimes referenced in the art, modified RNAs that do not have a phosphorus atom in their internucleoside backbone can also be considered to be oligonucleosides. In some embodiments, a modified RNAi agent will have a phosphorus atom in its internucleoside backbone.

[0329] Modified RNA backbones include, for example, phosphorothioates, chiral phosphorothioates, phosphorodithioates, phosphotriesters, aminoalkylphosphotriesters, methyl and other alkyl phosphonates including 3′-alkylene phosphonates and chiral phosphonates, phosphinates, phosphoramidates including 3′-amino phosphoramidate and aminoalkylphosphoramidates, thionophosphoramidates, thionoalkylphosphonates, thionoalkylphosphotriesters, and boranophosphates having normal 3′-5′ linkages, 2′-5′-linked analogs of these, and those having inverted polarity wherein the adjacent pairs of nucleoside units are linked 3′-5′ to 5′-3′ or 2′-5′ to 5′-2′. Various salts, e.g., sodium salts, mixed salts and free acid forms are also included.

[0330] Representative U.S. patents that teach the preparation of the above phosphorus-containing linkages include, but are not limited to, U.S. Pat. Nos. 3,687,808; 4,469,863; 4,476,301; 5,023,243; 5,177,195; 5,188,897; 5,264,423; 5,276,019; 5,278,302; 5,286,717; 5,321,131; 5,399,676; 5,405,939; 5,453,496; 5,455,233; 5,466,677; 5,476,925; 5,519,126; 5,536,821; 5,541,316; 5,550,111; 5,563,253; 5,571,799; 5,587,361; 5,625,050; 6,028,188; 6,124,445; 6,160,109; 6,169,170; 6,172,209; 6,239,265; 6,277,603; 6,326,199; 6,346,614; 6,444,423; 6,531,590; 6,534,639; 6,608,035; 6,683,167; 6,858,715; 6,867,294; 6,878,805; 7,015,315; 7,041,816; 7,273,933; 7,321,029; and RE39,464, the entire contents of each of which are hereby incorporated herein by reference.

[0331] Modified RNA backbones that do not include a phosphorus atom therein have backbones that are formed by short chain alkyl or cycloalkyl internucleoside linkages, mixed heteroatoms and alkyl or cycloalkyl internucleoside linkages, or one or more short chain heteroatomic or heterocyclic internucleoside linkages. These include those having morpholino linkages (formed in part from the sugar portion of a nucleoside); siloxane backbones; sulfide, sulfoxide and sulfone backbones; formacetyl and thioformacetyl backbones; methylene formacetyl and thioformacetyl backbones; alkene containing backbones; sulfamate backbones; methyleneimino and methylenehydrazino backbones; sulfonate and sulfonamide backbones; amide backbones; and others having mixed N, O, S and CH₂ component parts.

[0332] Representative U.S. patents that teach the preparation of the above oligonucleosides include, but are not limited to, U.S. Pat. Nos. 5,034,506; 5,166,315; 5,185,444; 5,214,134; 5,216,141; 5,235,033; 5,64,562; 5,264,564; 5,405,938; 5,434,257; 5,466,677; 5,470,967; 5,489,677; 5,541,307; 5,561,225; 5,596,086; 5,602,240; 5,608,046; 5,610,289; 5,618,704; 5,623,070; 5,663,312; 5,633,360; 5,677,437; and, 5,677,439, the entire contents of each of which are hereby incorporated herein by reference.

[0333] In other embodiments, suitable RNA mimetics are contemplated for use in RNAi agents, in which both the sugar and the internucleoside linkage, i.e., the backbone, of the nucleotide units are replaced with novel groups. The base units are maintained for hybridization with an appropriate nucleic acid target compound. One such oligomeric compound, an RNA mimetic that has been shown to have excellent hybridization properties, is referred to as a peptide nucleic acid (PNA). In PNA compounds, the sugar backbone of an RNA is replaced with an amide containing backbone, in particular an aminoethylglycine backbone. The nucleobases are retained and are bound directly or indirectly to aza nitrogen atoms of the amide portion of the backbone. Representative U.S. patents that teach the preparation of PNA compounds include, but are not limited to, U.S. Pat. Nos. 5,539,082; 5,714,331; and 5,719,262, the entire contents of each of which are hereby incorporated herein by reference. Additional PNA compounds suitable for use in the RNAi agents of the disclosure are described in, for example, in Nielsen et al., Science, 1991, 254, 1497-1500.

[0334] Some embodiments featured in the disclosure include RNAs with phosphorothioate backbones and oligonucleosides with heteroatom backbones, and in particular —CH₂—NH—CH₂—, —CH₂—N(CH₃)—O—CH₂— [known as a methylene (methylimino) or MMI backbone], —CH₂—O—N(CH₃)—CH₂—, —CH₂—N(CH₃)—N(CH₃)—CH₂— and —N(CH₃)—CH₂—CH₂— the above-referenced U.S. Pat. No. 5,489,677, and the amide backbones of the above-referenced U.S. Pat. No. 5,602,240. In some embodiments, the RNAs featured herein have morpholino backbone structures of the above-referenced U.S. Pat. No. 5,034,506. The native phosphodiester backbone can be represented as O—P(O)(OH)—OCH₂—.

[0335] Modified RNAs can also contain one or more substituted sugar moieties. The RNAi agents, e.g., dsRNAs, featured herein can include one of the following at the 2′-position: OH; F; O-, S-, or N-alkyl; O-, S-, or N-alkenyl; O-, S- or N-alkynyl; or O-alkyl-O-alkyl, wherein the alkyl, alkenyl and alkynyl can be substituted or unsubstituted C₁ to C₁₀ alkyl or C₂ to C₁₀ alkenyl and alkynyl. Exemplary suitable modifications include O[(CH₂)ₙO]ₘCH₃, O(CH₂)₋ₙOCH₃, O(CH₂)ₙNH₂, O(CH₂)ₙCH₃, O(CH₂)ₙONH₂, and O(CH₂)ₙON[(CH₂)·CH₃)]₂, where n and m are from 1 to about 10. In other embodiments, dsRNAs include one of the following at the 2′ position: C₁ to C₁₀ lower alkyl, substituted lower alkyl, alkaryl, aralkyl, O-alkaryl or O-aralkyl, SH, SCH₃, OCN, Cl, Br, CN, CF₃, OCF₃, SOCH₃, SO₂CH₃, ONO₂, NO₂, N₃, NH₂, heterocycloalkyl, heterocycloalkaryl, aminoalkylamino, polyalkylamino, substituted silyl, an RNA cleaving group, a reporter group, an intercalator, a group for improving the pharmacokinetic properties of a RNAi agent, or a group for improving the pharmacodynamic properties of a RNAi agent, and other substituents having similar properties. In some embodiments, the modification includes a 2′-methoxyethoxy (2′-O—CH₂CH₂OCH₃, also known as 2′-O-(2-methoxyethyl) or 2′-MOE) (Martin et al., Helv. Chim. Acta, 1995, 78:486-504) i.e., an alkoxy-alkoxy group. Another exemplary modification is 2′-dimethylaminooxyethoxy, i.e., a O(CH₂)₂ON(CH₃)₂ group, also known as 2′-DMAOE, as described in examples herein below, and 2′-dimethylaminoethoxyethoxy (also known in the art as 2′-O-dimethylaminoethoxyethyl or 2′-DMAEOE), i.e., 2′-O—CH₂—O—CH₂—N(CH₂)₂. Further exemplary modifications include: 5′-Me-2′-F nucleotides, 5′-Me-2′-OMe nucleotides, 5′-Me-2′-deoxynucleotides, (both R and S isomers in these three families); 2′-alkoxyalkyl; and 2′-NMA (N-methylacetamide).

[0336] Other modifications include 2′-methoxy (2′-OCH₃), 2′-aminopropoxy (2′-OCH₂CH₂CH₂NH₂), 2′-O-hexadecyl, and 2′-fluoro (2′-F). Similar modifications can also be made at other positions on the RNA of a RNAi agent, particularly the 3′ position of the sugar on the 3′ terminal nucleotide or in 2′-5′ linked dsRNAs and the 5′ position of 5′ terminal nucleotide. RNAi agents can also have sugar mimetics such as cyclobutyl moieties in place of the pentofuranosyl sugar. Representative U.S. patents that teach the preparation of such modified sugar structures include, but are not limited to, U.S. Pat. Nos. 4,981,957; 5,118,800; 5,319,080; 5,359,044; 5,393,878; 5,446,137; 5,466,786; 5,514,785; 5,519,134; 5,567,811; 5,576,427; 5,591,722; 5,597,909; 5,610,300; 5,627,053; 5,639,873; 5,646,265; 5,658,873; 5,670,633; and 5,700,920, certain of which are commonly owned with the instant application. The entire contents of each of the foregoing are hereby incorporated herein by reference.

[0337] An RNAi agent of the disclosure can also include nucleobase (often referred to in the art simply as “base”) modifications or substitutions. As used herein, “unmodified” or “natural” nucleobases include the purine bases adenine (A) and guanine (G), and the pyrimidine bases thymine (T), cytosine (C) and uracil (U). Modified nucleobases include other synthetic and natural nucleobases such as 5-methylcytosine (5-me-C), 5-hydroxymethyl cytosine, xanthine, hypoxanthine, 2-aminoadenine, 6-methyl and other alkyl derivatives of adenine and guanine, 2-propyl and other alkyl derivatives of adenine and guanine, 2-thiouracil, 2-thiothymine and 2-thiocytosine, 5-halouracil and cytosine, 5-propynyl uracil and cytosine, 6-azo uracil, cytosine and thymine, 5-uracil (pseudouracil), 4-thiouracil, 8-halo, 8-amino, 8-thiol, 8-thioalkyl, 8-hydroxyl anal other 8-substituted adenines and guanines, 5-halo, particularly 5-bromo, 5-trifluoromethyl and other 5-substituted uracils and cytosines, 7-methylguanine and 7-methyladenine, 8-azaguanine and 8-azaadenine, 7-deazaguanine and 7-daazaadenine and 3-deazaguanine and 3-deazaadenine. Further nucleobases include those disclosed in U.S. Pat. No. 3,687,808, those disclosed in Modified Nucleosides in Biochemistry, Biotechnology and Medicine, Herdewijn, P. ed. Wiley-VCH, 2008; those disclosed in The Concise Encyclopedia Of Polymer Science And Engineering, pages 858-859, Kroschwitz, J. L, ed. John Wiley & Sons, 1990, these disclosed by Englisch et al., (1991) Angewandte Chemie, International Edition, 30:613, and those disclosed by Sanghvi, Y S., Chapter 15, dsRNA Research and Applications, pages 289-302, Crooke, S. T. and Lebleu, B., Ed., CRC Press, 1993. Certain of these nucleobases are particularly useful for increasing the binding affinity of the oligomeric compounds featured in the disclosure. These include 5-substituted pyrimidines, 6-azapyrimidines and N-2, N-6 and 0-6 substituted purines, including 2-aminopropyladenine, 5-propynyluracil and 5-propynylcytosine. 5-methylcytosine substitutions have been shown to increase nucleic acid duplex stability by 0.6-1.2° C. (Sanghvi, Y. S., Crooke, S. T. and Lebleu, B., Eds., dsRNA Research and Applications, CRC Press, Boca Raton, 1993, pp. 276-278) and are exemplary base substitutions, even more particularly when combined with 2′-O-methoxyethyl sugar modifications.

[0338] Representative U.S. patents that teach the preparation of certain of the above noted modified nucleobases as well as other modified nucleobases include, but are not limited to, the above noted U.S. Pat. Nos. 3,687,808, 4,845,205; 5,130,302; 5,134,066; 5,175,273; 5,367,066; 5,432,272; 5,457,187; 5,459,255; 5,484,908; 5,502,177; 5,525,711; 5,552,540; 5,587,469; 5,594,121, 5,596,091; 5,614,617; 5,681,941; 5,750,692; 6,015,886; 6,147,200; 6,166,197; 6,222,025; 6,235,887; 6,380,368; 6,528,640; 6,639,062; 6,617,438; 7,045,610; 7,427,672; and 7,495,088, the entire contents of each of which are hereby incorporated herein by reference.

[0339] In some embodiments, an RNAi agent of the disclosure can also be modified to include one or more bicyclic sugar moieties. A “bicyclic sugar” is a furanosyl ring modified by a ring formed by the bridging of two carbons, whether adjacent or non-adjacent. A “bicyclic nucleoside” (“BNA”) is a nucleoside having a sugar moiety comprising a ring formed by bridging two carbons, whether adjacent or non-adjacent, of the sugar ring, thereby forming a bicyclic ring system. In certain embodiments, the bridge connects the 4′-carbon and the 2′-carbon of the sugar ring, optionally, via the 2′-acyclic oxygen atom. Thus, in some embodiments an agent of the invention may include one or more locked nucleic acids (LNA). A locked nucleic acid is a nucleotide having a modified ribose moiety in which the ribose moiety comprises an extra bridge connecting the 2′ and 4′ carbons. In other words, an LNA is a nucleotide comprising a bicyclic sugar moiety comprising a 4′-CH₂—O-2′ bridge. This structure effectively “locks” the ribose in the 3′-endo structural conformation. The addition of locked nucleic acids to siRNAs has been shown to increase siRNA stability in serum, and to reduce off-target effects (Elmen, J. et al., (2005) Nucleic Acids Research 33(1):439-447; Mook, O R. et al., (2007) Mol Canc Ther 6(3):833-843; Grunweller, A. et al., (2003) Nucleic Acids Research 31(12):3185-3193). Examples of bicyclic nucleosides for use in the polynucleotides of the invention include without limitation nucleosides comprising a bridge between the 4′ and the 2′ ribosyl ring atoms. In certain embodiments, the antisense polynucleotide agents of the invention include one or more bicyclic nucleosides comprising a 4′ to 2′ bridge.

[0340] A locked nucleoside can be represented by the structure (omitting stereochemistry),

[chemical structure]

[0341] wherein B is a nucleobase or modified nucleobase and L is the linking group that joins the 2′-carbon to the 4′-carbon of the ribose ring. Examples of such 4′ to 2′ bridged bicyclic nucleosides, include but are not limited to 4′-(CH₂)—O-2′ (LNA); 4′-(CH₂)—S-2′; 4′-(CH₂)₂—O-2′ (ENA); 4′-CH(CH₃)—O-2′ (also referred to as “constrained ethyl” or “cEt”) and 4′-CH(CH₂OCH₃)—O-2′ (and analogs thereof; see, e.g., U.S. Pat. No. 7,399,845); 4′-C(CH₃)(CH₃)—O-2′ (and analogs thereof; see e.g., U.S. Pat. No. 8,278,283); 4′-CH₂—N(OCH₃)-2′ (and analogs thereof; see e.g., U.S. Pat. No. 8,278,425); 4′-CH₂—O—N(CH₃)-2′ (see, e.g., U.S. Patent Publication No. 2004/0171570); 4′-CH₂—N(R)—O-2′, wherein R is H, C1-C12 alkyl, or a nitrogen protecting group (see, e.g., U.S. Pat. No. 7,427,672); 4′-CH₂—C(H)(CH₃)-2′ (see, e.g., Chattopadhyaya et al., J. Org. Chem., 2009, 74, 118-134); and 4′-CH₂—C(═CH₂)-2′ (and analogs thereof; see, e.g., U.S. Pat. No. 8,278,426). The entire contents of each of the foregoing are hereby incorporated herein by reference.

[0342] Additional representative US patents and US patent Publications that teach the preparation of locked nucleic acid nucleotides include, but are not limited to, the following: U.S. Pat. Nos. 6,268,490; 6,525,191; 6,670,461; 6,770,748; 6,794,499; 6,998,484; 7,053,207; 7,034,133; 7,084,125; 7,399,845; 7,427,672; 7,569,686; 7,741,457; 8,022,193; 8,030,467; 8,278,425; 8,278,426; 8,278,283; US 2008/0039618; and US 2009/0012281, the entire contents of each of which are hereby incorporated herein by reference.

[0343] Any of the foregoing bicyclic nucleosides can be prepared having one or more stereochemical sugar configurations including for example α-L-ribofuranose and β-D-ribofuranose (see WO 99/14226).

[0344] An RNAi agent of the disclosure can also be modified to include one or more constrained ethyl nucleotides. As used herein, a “constrained ethyl nucleotide” or “cEt” is a locked nucleic acid comprising a bicyclic sugar moiety comprising a 4′-CH(CH3)-0-2′ bridge. In one embodiment, a constrained ethyl nucleotide is in the S conformation referred to herein as “S-cEt.”

[0345] An RNAi agent of the disclosure may also include one or more “conformationally restricted nucleotides” (“CRN”). CRN are nucleotide analogs with a linker connecting the C2′ and C4′ carbons of ribose or the C3 and —C5′ carbons of ribose. CRN lock the ribose ring into a stable conformation and increase the hybridization affinity to mRNA. The linker is of sufficient length to place the oxygen in an optimal position for stability and affinity resulting in less ribose ring puckering.

[0346] Representative publications that teach the preparation of certain of the above noted CRN include, but are not limited to, US 2013/0190383; and WO 2013/036868, the entire contents of each of which are hereby incorporated herein by reference.

[0347] In some embodiments, a RNAi agent of the disclosure comprises one or more monomers that are UNA (unlocked nucleic acid) nucleotides. UNA is unlocked acyclic nucleic acid, wherein any of the bonds of the sugar has been removed, forming an unlocked “sugar” residue. In one example, UNA also encompasses monomer with bonds between C1′-C4′ have been removed (i.e. the covalent carbon-oxygen-carbon bond between the C1′ and C4′ carbons). In another example, the C2′-C3′ bond (i.e. the covalent carbon-carbon bond between the C2′ and C3′ carbons) of the sugar has been removed (see Nuc. Acids Symp. Series, 52, 133-134 (2008) and Fluiter et al., Mol. Biosyst., 2009, 10, 1039 hereby incorporated by reference).

[0348] Representative U.S. publications that teach the preparation of UNA include, but are not limited to, U.S. Pat. No. 8,314,227; and US Patent Publication Nos. 2013/0096289; 2013/0011922; and 2011/0313020, the entire contents of each of which are hereby incorporated herein by reference.

[0349] Potentially stabilizing modifications to the ends of RNA molecules can include N-(acetylaminocaproyl)-4-hydroxyprolinol (Hyp-C6-NHAc), N-(caproyl-4-hydroxyprolinol (Hyp-C6), N-(acetyl-4-hydroxyprolinol (Hyp-NHAc), thymidine-2′-O-deoxythymidine (ether), N-(aminocaproyl)-4-hydroxyprolinol (Hyp-C6-amino), 2-docosanoyl-uridine-3″-phosphate, inverted base dT(idT) and others. Disclosure of this modification can be found in WO 2011/005861.

[0350] Other modifications of a RNAi agent of the disclosure include a 5′ phosphate or 5′ phosphate mimic, e.g., a 5′-terminal phosphate or phosphate mimic on the antisense strand of a RNAi agent. Suitable phosphate mimics are disclosed in, for example US 2012/0157511, the entire contents of which are incorporated herein by reference.

### A. Modified RNAi Agents Comprising Motifs of the Disclosure

[0351] In certain aspects of the disclosure, the double-stranded RNAi agents of the disclosure include agents with chemical modifications as disclosed, for example, in WO 2013/075035, the entire contents of which are incorporated herein by reference. As shown herein and in WO 2013/075035, a superior result may be obtained by introducing one or more motifs of three identical modifications on three consecutive nucleotides into a sense strand or antisense strand of an RNAi agent, particularly at or near the cleavage site. In some embodiments, the sense strand and antisense strand of the RNAi agent may otherwise be completely modified. The introduction of these motifs interrupts the modification pattern, if present, of the sense or antisense strand. The RNAi agent may be optionally conjugated with a lipophilic ligand, e.g., a C16 ligand, for instance on the sense strand. The RNAi agent may be optionally modified with a (S)-glycol nucleic acid (GNA) modification, for instance on one or more residues of the antisense strand. The resulting RNAi agents present superior gene silencing activity.

[0352] Accordingly, the disclosure provides double stranded RNAi agents capable of inhibiting the expression of a target gene (i.e., an APOE gene) in vivo. The RNAi agent comprises a sense strand and an antisense strand. Each strand of the RNAi agent may be 15-30 nucleotides in length. For example, each strand may be 16-30 nucleotides in length, 17-30 nucleotides in length, 25-30 nucleotides in length, 27-30 nucleotides in length, 17-23 nucleotides in length, 17-21 nucleotides in length, 17-19 nucleotides in length, 19-25 nucleotides in length, 19-23 nucleotides in length, 19-21 nucleotides in length, 21-25 nucleotides in length, or 21-23 nucleotides in length. In certain embodiments, each strand is 19-23 nucleotides in length.

[0353] The sense strand and antisense strand typically form a duplex double stranded RNA (“dsRNA”), also referred to herein as an “RNAi agent.” The duplex region of an RNAi agent may be 15-30 nucleotide pairs in length. For example, the duplex region can be 16-30 nucleotide pairs in length, 17-30 nucleotide pairs in length, 27-30 nucleotide pairs in length, 17-23 nucleotide pairs in length, 17-21 nucleotide pairs in length, 17-19 nucleotide pairs in length, 19-25 nucleotide pairs in length, 19-23 nucleotide pairs in length, 19-21 nucleotide pairs in length, 21-25 nucleotide pairs in length, or 21-23 nucleotide pairs in length. In another example, the duplex region is selected from 15, 16, 17, 18, 19, 20, 21, 22, 23, 24, 25, 26, and 27 nucleotides in length. In preferred embodiments, the duplex region is 19-21 nucleotide pairs in length.

[0354] In one embodiment, the RNAi agent may contain one or more overhang regions or capping groups at the 3′-end, 5′-end, or both ends of one or both strands. The overhang can be 1-6 nucleotides in length, for instance 2-6 nucleotides in length, 1-5 nucleotides in length, 2-5 nucleotides in length, 1-4 nucleotides in length, 2-4 nucleotides in length, 1-3 nucleotides in length, 2-3 nucleotides in length, or 1-2 nucleotides in length. In preferred embodiments, the nucleotide overhang region is 2 nucleotides in length. The overhangs can be the result of one strand being longer than the other, or the result of two strands of the same length being staggered. The overhang can form a mismatch with the target mRNA or it can be complementary to the gene sequences being targeted or can be another sequence. The first and second strands can also be joined, e.g., by additional bases to form a hairpin, or by other non-base linkers.

[0355] In one embodiment, the nucleotides in the overhang region of the RNAi agent can each independently be a modified or unmodified nucleotide including, but no limited to 2′-sugar modified, such as, 2-F, 2′-O-methyl, thymidine (T), and any combinations thereof.

[0356] For example, TT can be an overhang sequence for either end on either strand. The overhang can form a mismatch with the target mRNA or it can be complementary to the gene sequences being targeted or can be another sequence.

[0357] The 5′- or 3′-overhangs at the sense strand, antisense strand or both strands of the RNAi agent may be phosphorylated. In some embodiments, the overhang region(s) contains two nucleotides having a phosphorothioate between the two nucleotides, where the two nucleotides can be the same or different. In one embodiment, the overhang is present at the 3′-end of the sense strand, antisense strand, or both strands. In one embodiment, this 3′-overhang is present in the antisense strand. In one embodiment, this 3′-overhang is present in the sense strand.

[0358] The RNAi agent may contain only a single overhang, which can strengthen the interference activity of the RNAi, without affecting its overall stability. For example, the single-stranded overhang may be located at the 3-terminal end of the sense strand or, alternatively, at the 3-terminal end of the antisense strand. The RNAi may also have a blunt end, located at the 5′-end of the antisense strand (or the 3′-end of the sense strand) or vice versa. Generally, the antisense strand of the RNAi has a nucleotide overhang at the 3′-end, and the 5′-end is blunt. While not wishing to be bound by theory, the asymmetric blunt end at the 5′-end of the antisense strand and 3′-end overhang of the antisense strand favor the guide strand loading into RISC process.

[0359] In one embodiment, the RNAi agent is a double ended bluntmer of 19 nucleotides in length, wherein the sense strand contains at least one motif of three 2′-F modifications on three consecutive nucleotides at positions 7, 8, 9 from the 5′end. The antisense strand contains at least one motif of three 2′-O-methyl modifications on three consecutive nucleotides at positions 11, 12, 13 from the 5′end.

[0360] In another embodiment, the RNAi agent is a double ended bluntmer of 20 nucleotides in length, wherein the sense strand contains at least one motif of three 2′-F modifications on three consecutive nucleotides at positions 8, 9, 10 from the 5′end. The antisense strand contains at least one motif of three 2′-O-methyl modifications on three consecutive nucleotides at positions 11, 12, 13 from the 5′end.

[0361] In yet another embodiment, the RNAi agent is a double ended bluntmer of 21 nucleotides in length, wherein the sense strand contains at least one motif of three 2′-F modifications on three consecutive nucleotides at positions 9, 10, 11 from the 5′end. The antisense strand contains at least one motif of three 2′-O-methyl modifications on three consecutive nucleotides at positions 11, 12, 13 from the 5′end.

[0362] In one embodiment, the RNAi agent comprises a 21 nucleotide sense strand and a 23 nucleotide antisense strand, wherein the sense strand contains at least one motif of three 2′-F modifications on three consecutive nucleotides at positions 9, 10, 11 from the 5′end; the antisense strand contains at least one motif of three 2′-O-methyl modifications on three consecutive nucleotides at positions 11, 12, 13 from the 5′end, wherein one end of the RNAi agent is blunt, while the other end comprises a 2 nucleotide overhang. Preferably, the 2 nucleotide overhang is at the 3′-end of the antisense strand. When the 2 nucleotide overhang is at the 3′-end of the antisense strand, there may be two phosphorothioate internucleotide linkages between the terminal three nucleotides, wherein two of the three nucleotides are the overhang nucleotides, and the third nucleotide is a paired nucleotide next to the overhang nucleotide. In one embodiment, the RNAi agent additionally has two phosphorothioate internucleotide linkages between the terminal three nucleotides at both the 5′-end of the sense strand and at the 5′-end of the antisense strand. In one embodiment, every nucleotide in the sense strand and the antisense strand of the RNAi agent, including the nucleotides that are part of the motifs are modified nucleotides. In one embodiment each residue is independently modified with a 2′-O-methyl or 2′-fluoro, e.g., in an alternating motif. Optionally, the RNAi agent further comprises a ligand (e.g., a lipophilic ligand, optionally a C16 ligand).

[0363] In one embodiment, the RNAi agent comprises a sense and an antisense strand, wherein the sense strand is 25-30 nucleotide residues in length, wherein starting from the 5′ terminal nucleotide (position 1) positions 1 to 23 of the first strand comprise at least 8 ribonucleotides; the antisense strand is 36-66 nucleotide residues in length and, starting from the 3′ terminal nucleotide, comprises at least 8 ribonucleotides in the positions paired with positions 1-23 of sense strand to form a duplex; wherein at least the 3′ terminal nucleotide of antisense strand is unpaired with sense strand, and up to 6 consecutive 3′ terminal nucleotides are unpaired with sense strand, thereby forming a 3′ single stranded overhang of 1-6 nucleotides; wherein the 5′ terminus of antisense strand comprises from 10-30 consecutive nucleotides which are unpaired with sense strand, thereby forming a 10-30 nucleotide single stranded 5′ overhang; wherein at least the sense strand 5′ terminal and 3′ terminal nucleotides are base paired with nucleotides of antisense strand when sense and antisense strands are aligned for maximum complementarity, thereby forming a substantially duplexed region between sense and antisense strands; and antisense strand is sufficiently complementary to a target RNA along at least 19 ribonucleotides of antisense strand length to reduce target gene expression when the double stranded nucleic acid is introduced into a mammalian cell; and wherein the sense strand contains at least one motif of three 2′-F modifications on three consecutive nucleotides, where at least one of the motifs occurs at or near the cleavage site. The antisense strand contains at least one motif of three 2′-O-methyl modifications on three consecutive nucleotides at or near the cleavage site.

[0364] In one embodiment, the RNAi agent comprises sense and antisense strands, wherein the RNAi agent comprises a first strand having a length which is at least 25 and at most 29 nucleotides and a second strand having a length which is at most 30 nucleotides with at least one motif of three 2′-O-methyl modifications on three consecutive nucleotides at position 11, 12, 13 from the 5′ end; wherein the 3′ end of the first strand and the 5′ end of the second strand form a blunt end and the second strand is 1-4 nucleotides longer at its 3′ end than the first strand, wherein the duplex region region which is at least 25 nucleotides in length, and the second strand is sufficiently complementary to a target mRNA along at least 19 nucleotide of the second strand length to reduce target gene expression when the RNAi agent is introduced into a mammalian cell, and wherein dicer cleavage of the RNAi agent preferentially results in an siRNA comprising the 3′ end of the second strand, thereby reducing expression of the target gene in the mammal. Optionally, the RNAi agent further comprises a ligand.

[0365] In one embodiment, the sense strand of the RNAi agent contains at least one motif of three identical modifications on three consecutive nucleotides, where one of the motifs occurs at the cleavage site in the sense strand.

[0366] In one embodiment, the antisense strand of the RNAi agent can also contain at least one motif of three identical modifications on three consecutive nucleotides, where one of the motifs occurs at or near the cleavage site in the antisense strand.

[0367] For an RNAi agent having a duplex region of 17-23 nucleotide in length, the cleavage site of the antisense strand is typically around the 10, 11 and 12 positions from the 5′-end. Thus the motifs of three identical modifications may occur at the 9, 10, 11 positions; 10, 11, 12 positions; 11, 12, 13 positions; 12, 13, 14 positions; or 13, 14, 15 positions of the antisense strand, the count starting from the 1^{st} nucleotide from the 5′-end of the antisense strand, or, the count starting from the 1^{st} paired nucleotide within the duplex region from the 5′-end of the antisense strand. The cleavage site in the antisense strand may also change according to the length of the duplex region of the RNAi from the 5′-end.

[0368] The sense strand of the RNAi agent may contain at least one motif of three identical modifications on three consecutive nucleotides at the cleavage site of the strand; and the antisense strand may have at least one motif of three identical modifications on three consecutive nucleotides at or near the cleavage site of the strand. When the sense strand and the antisense strand form a dsRNA duplex, the sense strand and the antisense strand can be so aligned that one motif of the three nucleotides on the sense strand and one motif of the three nucleotides on the antisense strand have at least one nucleotide overlap, i.e., at least one of the three nucleotides of the motif in the sense strand forms a base pair with at least one of the three nucleotides of the motif in the antisense strand. Alternatively, at least two nucleotides may overlap, or all three nucleotides may overlap.

[0369] In one embodiment, the sense strand of the RNAi agent may contain more than one motif of three identical modifications on three consecutive nucleotides. The first motif may occur at or near the cleavage site of the strand and the other motifs may be a wing modification. The term “wing modification” herein refers to a motif occurring at another portion of the strand that is separated from the motif at or near the cleavage site of the same strand. The wing modification is either adajacent to the first motif or is separated by at least one or more nucleotides. When the motifs are immediately adjacent to each other then the chemistry of the motifs are distinct from each other and when the motifs are separated by one or more nucleotide than the chemistries can be the same or different. Two or more wing modifications may be present. For instance, when two wing modifications are present, each wing modification may occur at one end relative to the first motif which is at or near cleavage site or on either side of the lead motif.

[0370] Like the sense strand, the antisense strand of the RNAi agent may contain more than one motif of three identical modifications on three consecutive nucleotides, with at least one of the motifs occurring at or near the cleavage site of the strand. This antisense strand may also contain one or more wing modifications in an alignment similar to the wing modifications that may be present on the sense strand.

[0371] In one embodiment, the wing modification on the sense strand or antisense strand of the RNAi agent typically does not include the first one or two terminal nucleotides at the 3′-end, 5′-end or both ends of the strand.

[0372] In another embodiment, the wing modification on the sense strand or antisense strand of the RNAi agent typically does not include the first one or two paired nucleotides within the duplex region at the 3′-end, 5′-end or both ends of the strand.

[0373] When the sense strand and the antisense strand of the RNAi agent each contain at least one wing modification, the wing modifications may fall on the same end of the duplex region, and have an overlap of one, two or three nucleotides.

[0374] When the sense strand and the antisense strand of the RNAi agent each contain at least two wing modifications, the sense strand and the antisense strand can be so aligned that two modifications each from one strand fall on one end of the duplex region, having an overlap of one, two or three nucleotides; two modifications each from one strand fall on the other end of the duplex region, having an overlap of one, two or three nucleotides; two modifications one strand fall on each side of the lead motif, having an overlap of one, two, or three nucleotides in the duplex region.

[0375] In one embodiment, the RNAi agent comprises mismatch(es) with the target, within the duplex, or combinations thereof. The mistmatch may occur in the overhang region or the duplex region. The base pair may be ranked on the basis of their propensity to promote dissociation or melting (e.g., on the free energy of association or dissociation of a particular pairing, the simplest approach is to examine the pairs on an individual pair basis, though next neighbor or similar analysis can also be used). In terms of promoting dissociation: A:U is preferred over G:C; G:U is preferred over G:C; and I:C is preferred over G:C (I=inosine). Mismatches, e.g., non-canonical or other than canonical pairings (as described elsewhere herein) are preferred over canonical (A:T, A:U, G:C) pairings; and pairings which include a universal base are preferred over canonical pairings.

[0376] In one embodiment, the RNAi agent comprises at least one of the first 1, 2, 3, 4, or 5 base pairs within the duplex regions from the 5′-end of the antisense strand independently selected from the group of: A:U, G:U, I:C, and mismatched pairs, e.g., non-canonical or other than canonical pairings or pairings which include a universal base, to promote the dissociation of the antisense strand at the 5′-end of the duplex.

[0377] In one embodiment, the nucleotide at the 1 position within the duplex region from the 5′-end in the antisense strand is selected from the group consisting of A, dA, dU, U, and dT. Alternatively, at least one of the first 1, 2 or 3 base pair within the duplex region from the 5′-end of the antisense strand is an AU base pair. For example, the first base pair within the duplex region from the 5′-end of the antisense strand is an AU base pair.

[0378] In another embodiment, the nucleotide at the 3′-end of the sense strand is deoxy-thymidine (dT). In another embodiment, the nucleotide at the 3′-end of the antisense strand is deoxy-thymidine (dT). In one embodiment, there is a short sequence of deoxy-thymidine nucleotides, for example, two dT nucleotides on the 3′-end of the sense or antisense strand.

[0379] In one embodiment, the sense strand sequence may be represented by formula (I):

5′ nₚ-Nₐ-(X X X )ᵢ-N_{b}-Y Y Y -N_{b}-(Z Z Z )ⱼ-Nₐ-N_{q} 3′
(I)

[0380] wherein:

[0381] i and j are each independently 0 or 1;

[0382] p and q are each independently 0-6;

[0383] each Nₐ independently represents an oligonucleotide sequence comprising 0-25 modified nucleotides, each sequence comprising at least two differently modified nucleotides; each N_{b} independently represents an oligonucleotide sequence comprising 0-10 modified nucleotides;

[0384] each nₚ and n_{q} independently represent an overhang nucleotide;

[0385] wherein Nb and Y do not have the same modification; and

[0386] XXX, YYY and ZZZ each independently represent one motif of three identical modifications on three consecutive nucleotides. Preferably YYY is all 2′-F modified nucleotides.

[0387] In one embodiment, the Nₐ or N_{b} comprise modifications of alternating pattern.

[0388] In one embodiment, the YYY motif occurs at or near the cleavage site of the sense strand. For example, when the RNAi agent has a duplex region of 17-23 nucleotides in length, the YYY motif can occur at or the vicinity of the cleavage site (e.g.: can occur at positions 6, 7, 8, 7, 8, 9, 8, 9, 10, 9, 10, 11, 10, 11, 12 or 11, 12, 13) of—the sense strand, the count starting from the 1⁴ nucleotide, from the 5′-end; or optionally, the count starting at the 1^{st} paired nucleotide within the duplex region, from the 5′-end.

[0389] In one embodiment, i is 1 and j is 0, or i is 0 and j is 1, or both i and j are 1. The sense strand can therefore be represented by the following formulas:

5′ nₚ-Nₐ-YYY-N_{b}-ZZZ-Nₐ-n_{q} 3′ (Ib);
5′ nₚ-Nₐ-XXX-N_{b}-YYY-Nₐ-n_{q} 3′ (Ic);
or
5′ nₚ-Nₐ-XXX-N_{b}-YYY-N_{b}-ZZZ-Nₐ-n_{q} 3′ (Id)

[0390] When the sense strand is represented by formula (Ib), N_{b} represents an oligonucleotide sequence comprising 0-10, 0-7, 0-5, 0-4, 0-2 or 0 modified nucleotides.

[0391] Each Nₐ independently can represent an oligonucleotide sequence comprising 2-20, 2-15, or 2-10 modified nucleotides.

[0392] When the sense strand is represented as formula (Ic), N_{b} represents an oligonucleotide sequence comprising 0-10, 0-7, 0-10, 0-7, 0-5, 0-4, 0-2 or 0 modified nucleotides. Each Nₐ can independently represent an oligonucleotide sequence comprising 2-20, 2-15, or 2-10 modified nucleotides.

[0393] When the sense strand is represented as formula (Id), each N_{b} independently represents an oligonucleotide sequence comprising 0-10, 0-7, 0-5, 0-4, 0-2 or 0 modified nucleotides. Preferably, N_{b} is 0, 1, 2, 3, 4, 5 or 6. Each Nₐ can independently represent an oligonucleotide sequence comprising 2-20, 2-15, or 2-10 modified nucleotides.

[0394] Each of X, Y and Z may be the same or different from each other.

[0395] In other embodiments, i is 0 and j is 0, and the sense strand may be represented by the formula:

5′ np -Na-YYY- Na-nq 3′(Ia).

[0396] When the sense strand is represented by formula (Ia), each Nₐ independently can represent an oligonucleotide sequence comprising 2-20, 2-15, or 2-10 modified nucleotides.

[0397] In one embodiment, the antisense strand sequence of the RNAi may be represented by formula (II):

5′ n_{q}′-Nₐ′-(Z′Z′Z′)ₖ-N_{b}′-Y′Y′Y′-N_{b}′-(X′X′X′)ᵢ-N′ₐ-
nₚ′ 3′ (II)

[0398] wherein:

[0399] k and l are each independently 0 or 1;

[0400] p′ and q′ are each independently 0-6;

each Nₐ′ independently represents an oligonucleotide sequence comprising 0-25 modified nucleotides, each sequence comprising at least two differently modified nucleotides;
each N_{b}′ independently represents an oligonucleotide sequence comprising 0-10 modified nucleotides;
each nₚ′ and n_{q}′ independently represent an overhang nucleotide;
wherein N_{b}′ and Y′ do not have the same modification;
and
X′X′X′, Y′Y′Y′ and Z′Z′Z′ each independently represent one motif of three identical modifications on three consecutive nucleotides.

[0401] In one embodiment, the Nₐ′ or N_{b}′ comprise modifications of alternating pattern.

[0402] The Y′Y′Y′ motif occurs at or near the cleavage site of the antisense strand. For example, when the RNAi agent has a duplex region of 17-23 nucleotide in length, the Y′Y′Y′ motif can occur at positions 9, 10, 11; 10, 11, 12; 11, 12, 13; 12, 13, 14; or 13, 14, 15 of the antisense strand, with the count starting from the 1^{st} nucleotide, from the 5′-end; or optionally, the count starting at the 1^{st} paired nucleotide within the duplex region, from the 5′-end. Preferably, the Y′Y′Y′ motif occurs at positions 11, 12, 13.

[0403] In one embodiment, Y′Y′Y′ motif is all 2′-OMe modified nucleotides.

[0404] In one embodiment, k is 1 and 1 is 0, or k is 0 and 1 is 1, or both k and l are 1.

[0405] The antisense strand can therefore be represented by the following formulas:

5′ n_{q′}-Nₐ′-Z′Z′Z′-N_{b}′-Y′Y′Y′-Nₐ′-n_{p′} 3′ (IIb);
5′ n_{q′}-Nₐ′-Y′Y′Y′-N_{b}′-X′X′X′-n_{p′} 3′ (IIc);
or
5′ n_{q′}-Nₐ′- Z′Z′Z′-N_{b}′-Y′Y′Y′-N_{b}′- X′X′X′-Nₐ′-n_{p′}
3′ (IId).

[0406] When the antisense strand is represented by formula (IIb), N_{b}′ represents an oligonucleotide sequence comprising 0-10, 0-7, 0-10, 0-7, 0-5, 0-4, 0-2 or 0 modified nucleotides. Each Nₐ′ independently represents an oligonucleotide sequence comprising 2-20, 2-15, or 2-10 modified nucleotides.

[0407] When the antisense strand is represented as formula (IIc), N_{b}′ represents an oligonucleotide sequence comprising 0-10, 0-7, 0-10, 0-7, 0-5, 0-4, 0-2 or 0 modified nucleotides. Each Nₐ′ independently represents an oligonucleotide sequence comprising 2-20, 2-15, or 2-10 modified nucleotides.

[0408] When the antisense strand is represented as formula (IId), each N_{b}′ independently represents an oligonucleotide sequence comprising 0-10, 0-7, 0-10, 0-7, 0-5, 0-4, 0-2 or 0 modified nucleotides. Each Nₐ′ independently represents an oligonucleotide sequence comprising 2-20, 2-15, or 2-10 modified nucleotides. Preferably, N_{b} is 0, 1, 2, 3, 4, 5 or 6.

[0409] In other embodiments, k is 0 and 1 is 0 and the antisense strand may be represented by the formula:

5′ n_{p′}-N_{a′}-Y′Y′Y′- N_{a′}-n_{q′} 3′ (Ia).

[0410] When the antisense strand is represented as formula (IIa), each Nₐ′ independently represents an oligonucleotide sequence comprising 2-20, 2-15, or 2-10 modified nucleotides.

[0411] Each of X′, Y′ and Z′ may be the same or different from each other.

[0412] Each nucleotide of the sense strand and antisense strand may be independently modified with LNA, HNA, CeNA, 2′-methoxyethyl, 2′-O-methyl, 2′-O-allyl, 2′-C-allyl, 2′-hydroxyl, or 2′-fluoro. For example, each nucleotide of the sense strand and antisense strand is independently modified with 2′-O-methyl or 2′-fluoro. Each X, Y, Z, X′, Y′ and Z′, in particular, may represent a 2′-O-methyl modification or a 2′-fluoro modification.

[0413] In one embodiment, the sense strand of the RNAi agent may contain YYY motif occurring at 9, 10 and 11 positions of the strand when the duplex region is 21 nt, the count starting from the 1^{st} nucleotide from the 5′-end, or optionally, the count starting at the 1^{st} paired nucleotide within the duplex region, from the 5′-end; and Y represents 2′-F modification. The sense strand may additionally contain XXX motif or ZZZ motifs as wing modifications at the opposite end of the duplex region; and XXX and ZZZ each independently represents a 2′-OMe modification or 2′-F modification.

[0414] In one embodiment the antisense strand may contain Y′Y′Y′ motif occurring at positions 11, 12, 13 of the strand, the count starting from the 1^{st} nucleotide from the 5′-end, or optionally, the count starting at the 1^{st} paired nucleotide within the duplex region, from the 5′-end; and Y′ represents 2′-O-methyl modification. The antisense strand may additionally contain X′X′X′ motif or Z′Z′Z′ motifs as wing modifications at the opposite end of the duplex region; and X′X′X′ and Z′Z′Z′ each independently represents a 2′-OMe modification or 2′-F modification.

[0415] The sense strand represented by any one of the above formulas (Ia), (Ib), (Ic), and (Id) forms a duplex with a antisense strand being represented by any one of formulas (IIa), (IIb), (IIc), and (IId), respectively.

[0416] Accordingly, the RNAi agents for use in the methods of the disclosure may comprise a sense strand and an antisense strand, each strand having 14 to 30 nucleotides, the RNAi duplex represented by formula (III):

sense:
5′ nₚ -Nₐ-(X X X)ᵢ -N_{b}- Y Y Y -N_{b} -(Z Z Z)ⱼ-Nₐ-n_{q}
3′
antisense:
3′ nₚ′-Nₐ′ -(X′X′X′)ₖ-N_{b}′-Y′Y′Y′-N_{b}′-(Z′Z′Z′)ᵢ-
Nₐ′-n_{q}′ 5′ (III)

[0417] wherein:

[0418] i, j, k, and l are each independently 0 or 1;

[0419] p, p′, q, and q′ are each independently 0-6;

[0420] each Nₐ and Nₐ′ independently represents an oligonucleotide sequence comprising 0-25 modified nucleotides, each sequence comprising at least two differently modified nucleotides;

[0421] each N_{b} and N_{b}′ independently represents an oligonucleotide sequence comprising 0-10 modified nucleotides;

[0422] wherein

[0423] each nₚ′, nₚ, n_{q}′, and n_{q}, each of which may or may not be present, independently represents an overhang nucleotide; and

[0424] XXX, YYY, ZZZ, X′X′X′, Y′Y′Y′, and Z′Z′Z′ each independently represent one motif of three identical modifications on three consecutive nucleotides.

[0425] In one embodiment, i is 0 and j is 0; or i is 1 and j is 0; or i is 0 and j is 1; or both i and j are 0; or both i and j are 1. In another embodiment, k is 0 and 1 is 0; or k is 1 and 1 is 0; k is 0 and 1 is 1; or both k and l are 0; or both k and l are 1.

[0426] Exemplary combinations of the sense strand and antisense strand forming a RNAi duplex include the formulas below:

5′nₚ-Nₐ-Y YY-Nₐ-n_{q} 3′
3′ nₚ′-Na′-Y′Y′Y′ -Nₐ′n_{q}′ 5′
(IIIa)
5′ nₚ -Nₐ-Y Y Y -N_{b}-Z Z Z -Nₐ-n_{q} 3′
3′ nₚ′-Nₐ′-Y′Y′Y′-N_{b}′-Z′Z′Z′-Nₐ′-n_{q}′ 5′
(IIIb)
5′ nₚ-Nₐ-X X X -N_{b}-Y Y Y -Nₐ-n_{q} 3′
3′ nₚ′-Nₐ′-X′X′X′-N_{b}′-Y′Y′Y′-Nₐ′-n_{q}′ 5′
(IIIc)
5′ nₚ -Nₐ -XXX -N_{b}-Y Y Y -N- Z Z Z -Nₐ-n_{q} 3′
3′ nₚ′-Nₐ′-X′X′X′-N_{b}′-Y′Y′Y′-N_{b}′-Z′Z′Z′-Nₐ-n_{q}′ 5′
(IIId)

[0427] When the RNAi agent is represented by formula (IIIa), each Nₐ independently represents an oligonucleotide sequence comprising 2-20, 2-15, or 2-10 modified nucleotides.

[0428] When the RNAi agent is represented by formula (IIIb), each N_{b} independently represents an oligonucleotide sequence comprising 1-10, 1-7, 1-5 or 1-4 modified nucleotides. Each Nₐ independently represents an oligonucleotide sequence comprising 2-20, 2-15, or 2-10 modified nucleotides.

[0429] When the RNAi agent is represented as formula (IIIc), each N_{b}, N_{b}′ independently represents an oligonucleotide sequence comprising 0-10, 0-7, 0-10, 0-7, 0-5, 0-4, 0-2 or 0 modified nucleotides. Each Nₐ independently represents an oligonucleotide sequence comprising 2-20, 2-15, or 2-10 modified nucleotides.

[0430] When the RNAi agent is represented as formula (IIId), each N_{b}, N_{b}′ independently represents an oligonucleotide sequence comprising 0-10, 0-7, 0-10, 0-7, 0-5, 0-4, 0-2 or 0 modified nucleotides. Each Nₐ, Nₐ′ independently represents an oligonucleotide sequence comprising 2-20, 2-15, or 2-10 modified nucleotides. Each of Nₐ, Nₐ′, N_{b} and N_{b}′ independently comprises modifications of alternating pattern.

[0431] In one embodiment, when the RNAi agent is represented by formula (IIId), the Nₐ modifications are 2′-O-methyl or 2′-fluoro modifications. In another embodiment, when the RNAi agent is represented by formula (IIId), the Nₐ modifications are 2′-O-methyl or 2′-fluoro modifications and nₚ′>0 and at least one nₚ′ is linked to a neighboring nucleotide a via phosphorothioate linkage. In yet another embodiment, when the RNAi agent is represented by formula (IIId), the Nₐ modifications are 2′-O-methyl or 2′-fluoro modifications, nₚ′>0 and at least one nₚ′ is linked to a neighboring nucleotide via phosphorothioate linkage, and the sense strand is conjugated to one or more C16 (or related) moieties attached through a bivalent or trivalent branched linker (described below). In another embodiment, when the RNAi agent is represented by formula (IIId), the Nₐ modifications are 2′-O-methyl or 2′-fluoro modifications, nₚ′>0 and at least one nₚ′ is linked to a neighboring nucleotide via phosphorothioate linkage, the sense strand comprises at least one phosphorothioate linkage, and the sense strand is conjugated to one or more lipophilic, e.g., C16 (or related) moieties, optionally attached through a bivalent or trivalent branched linker.

[0432] In one embodiment, when the RNAi agent is represented by formula (IIIa), the Nₐ modifications are 2′-O-methyl or 2′-fluoro modifications, nₚ′>0 and at least one nₚ′ is linked to a neighboring nucleotide via phosphorothioate linkage, the sense strand comprises at least one phosphorothioate linkage, and the sense strand is conjugated to one or more lipophilic, e.g., C16 (or related) moieties attached through a bivalent or trivalent branched linker.

[0433] In one embodiment, the RNAi agent is a multimer containing at least two duplexes represented by formula (III), (IIIa), (IIIb), (IIIc), and (IIId), wherein the duplexes are connected by a linker. The linker can be cleavable or non-cleavable. Optionally, the multimer further comprises a ligand. Each of the duplexes can target the same gene or two different genes; or each of the duplexes can target same gene at two different target sites.

[0434] In one embodiment, the RNAi agent is a multimer containing three, four, five, six or more duplexes represented by formula (III), (IIIa), (IIIb), (IIIc), and (IIId), wherein the duplexes are connected by a linker. The linker can be cleavable or non-cleavable. Optionally, the multimer further comprises a ligand. Each of the duplexes can target the same gene or two different genes; or each of the duplexes can target same gene at two different target sites.

[0435] In one embodiment, two RNAi agents represented by formula (III), (IIIa), (IIIb), (IIIc), and (IIId) are linked to each other at the 5′ end, and one or both of the 3′ ends and are optionally conjugated to a ligand. Each of the agents can target the same gene or two different genes; or each of the agents can target same gene at two different target sites.

[0436] Various publications describe multimeric RNAi agents that can be used in the methods of the disclosure. Such publications include WO2007/091269, WO2010/141511, WO2007/117686, WO2009/014887, and WO2011/031520; and U.S. Pat. No. 7,858,769, the entire contents of each of which are hereby incorporated herein by reference.

[0437] In certain embodiments, the compositions and methods of the disclosure include a vinyl phosphonate (VP) modification of an RNAi agent as described herein. In exemplary embodiments, a 5′ vinyl phosphonate modified nucleotide of the disclosure has the structure:

[chemical structure]

wherein X is O or S;

[0438] R is hydrogen, hydroxy, fluoro, or C₁₋₂₀alkoxy (e.g., methoxy or n-hexadecyloxy);

[0439] R^{5′} is ═C(H)—P(O)(OH)₂ and the double bond between the C5′ carbon and R^{5′} is in the E or Z orientation (e.g., E orientation); and

[0440] B is a nucleobase or a modified nucleobase, optionally where B is adenine, guanine, cytosine, thymine, or uracil.

[0441] A vinyl phosphonate of the instant disclosure may be attached to either the antisense or the sense strand of a dsRNA of the disclosure. In certain embodiments, a vinyl phosphonate of the instant disclosure is attached to the antisense strand of a dsRNA, optionally at the 5′ end of the antisense strand of the dsRNA.

[0442] Vinyl phosphate modifications are also contemplated for the compositions and methods of the instant disclosure. An exemplary vinyl phosphate structure includes the preceding structure, where R^{5′} is ═C(H)—OP(O)(OH)₂ and the double bond between the C5′ carbon and R^{5′} is in the E or Z orientation (e.g., E orientation).

[0443] E. Thermally Destabilizing Modifications

[0444] In certain embodiments, a dsRNA molecule can be optimized for RNA interference by incorporating thermally destabilizing modifications in the seed region of the antisense strand (i.e., at positions 2-9 of the 5′-end of the antisense strand) to reduce or inhibit off-target gene silencing. It has been discovered that dsRNAs with an antisense strand comprising at least one thermally destabilizing modification of the duplex within the first 9 nucleotide positions, counting from the 5′ end, of the antisense strand have reduced off-target gene silencing activity. Accordingly, in some embodiments, the antisense strand comprises at least one (e.g., one, two, three, four, five or more) thermally destabilizing modification of the duplex within the first 9 nucleotide positions of the 5′ region of the antisense strand. In some embodiments, one or more thermally destabilizing modification(s) of the duplex is/are located in positions 2-9, or preferably positions 4-8, from the 5′-end of the antisense strand. In some further embodiments, the thermally destabilizing modification(s) of the duplex is/are located at position 6, 7 or 8 from the 5′-end of the antisense strand. In still some further embodiments, the thermally destabilizing modification of the duplex is located at position 7 from the 5′-end of the antisense strand. The term “thermally destabilizing modification(s)” includes modification(s) that would result with a dsRNA with a lower overall melting temperature (Tm) (preferably a Tm with one, two, three or four degrees lower than the Tm of the dsRNA without having such modification(s). In some embodiments, the thermally destabilizing modification of the duplex is located at position 2, 3, 4, 5 or 9 from the 5′-end of the antisense strand.

[0445] The thermally destabilizing modifications can include, but are not limited to, abasic modification; mismatch with the opposing nucleotide in the opposing strand; and sugar modification such as 2′-deoxy modification or acyclic nucleotide, e.g., unlocked nucleic acids (UNA) or glycol nucleic acid (GNA).

[0446] Exemplified abasic modifications include, but are not limited to the following:

[chemical structure]

### Wherein R═H, Me, Et or OMe; R′═H, Me, Et or OMe; R″═H, Me, Et or OMe

[chemical structure]

wherein B is a modified or unmodified nucleobase.

[0448] Exemplified sugar modifications include, but are not limited to the following:

[chemical structure]

wherein B is a modified or unmodified nucleobase.

[0449] In some embodiments the thermally destabilizing modification of the duplex is selected from the group consisting of:

[chemical structure]

wherein B is a modified or unmodified nucleobase and the asterisk on each structure represents either R, S or racemic.

[0450] The term “acyclic nucleotide” refers to any nucleotide having an acyclic ribose sugar, for example, where any of bonds between the ribose carbons (e.g., C1′-C2′, C2′-C3′, C3′-C4′, C4′-04′, or C1′-04′) is absent or at least one of ribose carbons or oxygen (e.g., C1′, C2′, C3′, C4′ or 04′) are independently or in combination absent from the nucleotide. In some embodiments, acyclic nucleotide is

[chemical structure]

wherein B is a modified or unmodified nucleobase, R¹ and R² independently are H, halogen, OR₃, or alkyl; and R₃ is H, alkyl, cycloalkyl, aryl, aralkyl, heteroaryl or sugar). The term “UNA” refers to unlocked acyclic nucleic acid, wherein any of the bonds of the sugar has been removed, forming an unlocked “sugar” residue. In one example, UNA also encompasses monomers with bonds between C1′-C4′ being removed (i.e. the covalent carbon-oxygen-carbon bond between the C1′ and C4′ carbons). In another example, the C2′-C3′ bond (i.e. the covalent carbon-carbon bond between the C2′ and C3′ carbons) of the sugar is removed (see Mikhailov et. al., Tetrahedron Letters, 26 (17): 2059 (1985); and Fluiter et al., Mol. Biosyst., 10: 1039 (2009), which are hereby incorporated by reference in their entirety). The acyclic derivative provides greater backbone flexibility without affecting the Watson-Crick pairings. The acyclic nucleotide can be linked via 2′-5′ or 3′-5′ linkage.

[0451] The term ‘GNA’ refers to glycol nucleic acid which is a polymer similar to DNA or RNA but differing in the composition of its “backbone” in that is composed of repeating glycerol units linked by phosphodiester bonds:

[chemical structure]

[0452] The thermally destabilizing modification of the duplex can be mismatches (i.e., noncomplementary base pairs) between the thermally destabilizing nucleotide and the opposing nucleotide in the opposite strand within the dsRNA duplex. Exemplary mismatch base pairs include G:G, G:A, G:U, G:T, A:A, A:C, C:C, C:U, C:T, U:U, T:T, U:T, or a combination thereof. Other mismatch base pairings known in the art are also amenable to the present invention. A mismatch can occur between nucleotides that are either naturally occurring nucleotides or modified nucleotides, i.e., the mismatch base pairing can occur between the nucleobases from respective nucleotides independent of the modifications on the ribose sugars of the nucleotides. In certain embodiments, the dsRNA molecule contains at least one nucleobase in the mismatch pairing that is a 2′-deoxy nucleobase; e.g., the 2′-deoxy nucleobase is in the sense strand.

[0453] In some embodiments, the thermally destabilizing modification of the duplex in the seed region of the antisense strand includes nucleotides with impaired W—C H-bonding to complementary base on the target mRNA, such as:

[chemical structure]

[0454] More examples of abasic nucleotide, acyclic nucleotide modifications (including UNA and GNA), and mismatch modifications have been described in detail in WO 2011/133876, which is herein incorporated by reference in its entirety.

The thermally destabilizing modifications may also include universal base with reduced or abolished capability to form hydrogen bonds with the opposing bases, and phosphate modifications.

[0455] In some embodiments, the thermally destabilizing modification of the duplex includes nucleotides with non-canonical bases such as, but not limited to, nucleobase modifications with impaired or completely abolished capability to form hydrogen bonds with bases in the opposite strand. These nucleobase modifications have been evaluated for destabilization of the central region of the dsRNA duplex as described in WO 2010/0011895, which is herein incorporated by reference in its entirety. Exemplary nucleobase modifications are:

[chemical structure]

[0456] In some embodiments, the thermally destabilizing modification of the duplex in the seed region of the antisense strand includes one or more α-nucleotide complementary to the base on the target mRNA, such as:

[chemical structure]

wherein R is H, OH, OCH₃, F, NH₂, NHMe, NMe₂ or O-alkyl.

[0457] Exemplary phosphate modifications known to decrease the thermal stability of dsRNA duplexes compared to natural phosphodiester linkages are:

[chemical structure]

[0458] The alkyl for the R group can be a C₁-C₆alkyl. Specific alkyls for the R group include, but are not limited to methyl, ethyl, propyl, isopropyl, butyl, pentyl and hexyl.

As the skilled artisan will recognize, in view of the functional role of nucleobases is defining specificity of a RNAi agent of the disclosure, while nucleobase modifications can be performed in the various manners as described herein, e.g., to introduce destabilizing modifications into a RNAi agent of the disclosure, e.g., for purpose of enhancing on-target effect relative to off-target effect, the range of modifications available and, in general, present upon RNAi agents of the disclosure tends to be much greater for non-nucleobase modifications, e.g., modifications to sugar groups or phosphate backbones of polyribonucleotides. Such modifications are described in greater detail in other sections of the instant disclosure and are expressly contemplated for RNAi agents of the disclosure, either possessing native nucleobases or modified nucleobases as described above or elsewhere herein.

[0459] In addition to the antisense strand comprising a thermally destabilizing modification, the dsRNA can also comprise one or more stabilizing modifications. For example, the dsRNA can comprise at least two (e.g., two, three, four, five, six, seven, eight, nine, ten or more) stabilizing modifications. Without limitations, the stabilizing modifications all can be present in one strand. In some embodiments, both the sense and the antisense strands comprise at least two stabilizing modifications. The stabilizing modification can occur on any nucleotide of the sense strand or antisense strand. For instance, the stabilizing modification can occur on every nucleotide on the sense strand or antisense strand; each stabilizing modification can occur in an alternating pattern on the sense strand or antisense strand; or the sense strand or antisense strand comprises both stabilizing modification in an alternating pattern. The alternating pattern of the stabilizing modifications on the sense strand may be the same or different from the antisense strand, and the alternating pattern of the stabilizing modifications on the sense strand can have a shift relative to the alternating pattern of the stabilizing modifications on the antisense strand.

[0460] In some embodiments, the antisense strand comprises at least two (e.g., two, three, four, five, six, seven, eight, nine, ten or more) stabilizing modifications. Without limitations, a stabilizing modification in the antisense strand can be present at any positions. In some embodiments, the antisense comprises stabilizing modifications at positions 2, 6, 8, 9, 14, and 16 from the 5′-end. In some other embodiments, the antisense comprises stabilizing modifications at positions 2, 6, 14, and 16 from the 5′-end. In still some other embodiments, the antisense comprises stabilizing modifications at positions 2, 14, and 16 from the 5′-end.

[0461] In some embodiments, the antisense strand comprises at least one stabilizing modification adjacent to the destabilizing modification. For example, the stabilizing modification can be the nucleotide at the 5′-end or the 3′-end of the destabilizing modification, i.e., at position −1 or +1 from the position of the destabilizing modification. In some embodiments, the antisense strand comprises a stabilizing modification at each of the 5′-end and the 3′-end of the destabilizing modification, i.e., positions −1 and +1 from the position of the destabilizing modification.

[0462] In some embodiments, the antisense strand comprises at least two stabilizing modifications at the 3′-end of the destabilizing modification, i.e., at positions +1 and +2 from the position of the destabilizing modification.

[0463] In some embodiments, the sense strand comprises at least two (e.g., two, three, four, five, six, seven, eight, nine, ten or more) stabilizing modifications. Without limitations, a stabilizing modification in the sense strand can be present at any positions. In some embodiments, the sense strand comprises stabilizing modifications at positions 7, 10, and 11 from the 5′-end. In some other embodiments, the sense strand comprises stabilizing modifications at positions 7, 9, 10, and 11 from the 5′-end. In some embodiments, the sense strand comprises stabilizing modifications at positions opposite or complimentary to positions 11, 12, and 15 of the antisense strand, counting from the 5′-end of the antisense strand. In some other embodiments, the sense strand comprises stabilizing modifications at positions opposite or complimentary to positions 11, 12, 13, and 15 of the antisense strand, counting from the 5′-end of the antisense strand. In some embodiments, the sense strand comprises a block of two, three, or four stabilizing modifications.

[0464] In some embodiments, the sense strand does not comprise a stabilizing modification in position opposite or complimentary to the thermally destabilizing modification of the duplex in the antisense strand.

[0465] Exemplary thermally stabilizing modifications include, but are not limited to, 2′-fluoro modifications. Other thermally stabilizing modifications include, but are not limited to, LNA.

[0466] In some embodiments, the dsRNA of the disclosure comprises at least four (e.g., four, five, six, seven, eight, nine, ten, or more) 2′-fluoro nucleotides. Without limitations, the 2′-fluoro nucleotides all can be present in one strand. In some embodiments, both the sense and the antisense strands comprise at least two 2′-fluoro nucleotides. The 2′-fluoro modification can occur on any nucleotide of the sense strand or antisense strand. For instance, the 2′-fluoro modification can occur on every nucleotide on the sense strand or antisense strand; each 2′-fluoro modification can occur in an alternating pattern on the sense strand or antisense strand; or the sense strand or antisense strand comprises both 2′-fluoro modifications in an alternating pattern. The alternating pattern of the 2′-fluoro modifications on the sense strand may be the same or different from the antisense strand, and the alternating pattern of the 2′-fluoro modifications on the sense strand can have a shift relative to the alternating pattern of the 2′-fluoro modifications on the antisense strand.

[0467] In some embodiments, the antisense strand comprises at least two (e.g., two, three, four, five, six, seven, eight, nine, ten, or more) 2′-fluoro nucleotides. Without limitations, a 2′-fluoro modification in the antisense strand can be present at any positions. In some embodiments, the antisense comprises 2′-fluoro nucleotides at positions 2, 6, 8, 9, 14, and 16 from the 5′-end. In some other embodiments, the antisense comprises 2′-fluoro nucleotides at positions 2, 6, 14, and 16 from the 5′-end. In still some other embodiments, the antisense comprises 2′-fluoro nucleotides at positions 2, 14, and 16 from the 5′-end.

[0468] In some embodiments, the antisense strand comprises at least one 2′-fluoro nucleotide adjacent to the destabilizing modification. For example, the 2′-fluoro nucleotide can be the nucleotide at the 5′-end or the 3′-end of the destabilizing modification, i.e., at position −1 or +1 from the position of the destabilizing modification. In some embodiments, the antisense strand comprises a 2′-fluoro nucleotide at each of the 5′-end and the 3′-end of the destabilizing modification, i.e., positions −1 and +1 from the position of the destabilizing modification.

[0469] In some embodiments, the antisense strand comprises at least two 2′-fluoro nucleotides at the 3′-end of the destabilizing modification, i.e., at positions +1 and +2 from the position of the destabilizing modification.

[0470] In some embodiments, the sense strand comprises at least two (e.g., two, three, four, five, six, seven, eight, nine, ten or more) 2′-fluoro nucleotides. Without limitations, a 2′-fluoro modification in the sense strand can be present at any positions. In some embodiments, the antisense comprises 2′-fluoro nucleotides at positions 7, 10, and 11 from the 5′-end. In some other embodiments, the sense strand comprises 2′-fluoro nucleotides at positions 7, 9, 10, and 11 from the 5′-end. In some embodiments, the sense strand comprises 2′-fluoro nucleotides at positions opposite or complimentary to positions 11, 12, and 15 of the antisense strand, counting from the 5′-end of the antisense strand. In some other embodiments, the sense strand comprises 2′-fluoro nucleotides at positions opposite or complimentary to positions 11, 12, 13, and 15 of the antisense strand, counting from the 5′-end of the antisense strand. In some embodiments, the sense strand comprises a block of two, three or four 2′-fluoro nucleotides.

[0471] In some embodiments, the sense strand does not comprise a 2′-fluoro nucleotide in position opposite or complimentary to the thermally destabilizing modification of the duplex in the antisense strand.

[0472] In some embodiments, the dsRNA molecule of the disclosure comprises a 21 nucleotides (nt) sense strand and a 23 nucleotides (nt) antisense, wherein the antisense strand contains at least one thermally destabilizing nucleotide, where the at least one thermally destabilizing nucleotide occurs in the seed region of the antisense strand (i.e., at position 2-9 of the 5′-end of the antisense strand), wherein one end of the dsRNA is blunt, while the other end is comprises a 2 nt overhang, and wherein the dsRNA optionally further has at least one (e.g., one, two, three, four, five, six or all seven) of the following characteristics: (i) the antisense comprises 2, 3, 4, 5 or 6 2′-fluoro modifications; (ii) the antisense comprises 1, 2, 3, 4 or 5 phosphorothioate internucleotide linkages; (iii) the sense strand is conjugated with a ligand; (iv) the sense strand comprises 2, 3, 4 or 5 2′-fluoro modifications; (v) the sense strand comprises 1, 2, 3, 4 or 5 phosphorothioate internucleotide linkages; (vi) the dsRNA comprises at least four 2′-fluoro modifications; and (vii) the dsRNA comprises a blunt end at 5′-end of the antisense strand. Preferably, the 2 nt overhang is at the 3′-end of the antisense.

[0473] In some embodiments, the dsRNA molecule of the disclosure comprising a sense and antisense strands, wherein: the sense strand is 25-30 nucleotide residues in length, wherein starting from the 5′ terminal nucleotide (position 1), positions 1 to 23 of said sense strand comprise at least 8 ribonucleotides; antisense strand is 36-66 nucleotide residues in length and, starting from the 3′ terminal nucleotide, at least 8 ribonucleotides in the positions paired with positions 1-23 of sense strand to form a duplex; wherein at least the 3′ terminal nucleotide of antisense strand is unpaired with sense strand, and up to 6 consecutive 3′ terminal nucleotides are unpaired with sense strand, thereby forming a 3′ single stranded overhang of 1-6 nucleotides; wherein the 5′ terminus of antisense strand comprises from 10-30 consecutive nucleotides which are unpaired with sense strand, thereby forming a 10-30 nucleotide single stranded 5′ overhang; wherein at least the sense strand 5′ terminal and 3′ terminal nucleotides are base paired with nucleotides of antisense strand when sense and antisense strands are aligned for maximum complementarity, thereby forming a substantially duplexed region between sense and antisense strands; and antisense strand is sufficiently complementary to a target RNA along at least 19 ribonucleotides of antisense strand length to reduce target gene expression when said double stranded nucleic acid is introduced into a mammalian cell; and wherein the antisense strand contains at least one thermally destabilizing nucleotide, where at least one thermally destabilizing nucleotide is in the seed region of the antisense strand (i.e. at position 2-9 of the 5′-end of the antisense strand). For example, the thermally destabilizing nucleotide occurs between positions opposite or complimentary to positions 14-17 of the 5′-end of the sense strand, and wherein the dsRNA optionally further has at least one (e.g., one, two, three, four, five, six or all seven) of the following characteristics: (i) the antisense comprises 2, 3, 4, 5, or 6 2′-fluoro modifications; (ii) the antisense comprises 1, 2, 3, 4, or 5 phosphorothioate internucleotide linkages; (iii) the sense strand is conjugated with a ligand; (iv) the sense strand comprises 2, 3, 4, or 5 2′-fluoro modifications; (v) the sense strand comprises 1, 2, 3, 4, or 5 phosphorothioate internucleotide linkages; and (vi) the dsRNA comprises at least four 2′-fluoro modifications; and (vii) the dsRNA comprises a duplex region of 12-30 nucleotide pairs in length.

[0474] In some embodiments, the dsRNA molecule of the disclosure comprises a sense and antisense strands, wherein said dsRNA molecule comprises a sense strand having a length which is at least 25 and at most 29 nucleotides and an antisense strand having a length which is at most 30 nucleotides with the sense strand comprises a modified nucleotide that is susceptible to enzymatic degradation at position 11 from the 5′end, wherein the 3′ end of said sense strand and the 5′ end of said antisense strand form a blunt end and said antisense strand is 1-4 nucleotides longer at its 3′ end than the sense strand, wherein the duplex region which is at least 25 nucleotides in length, and said antisense strand is sufficiently complementary to a target mRNA along at least 19 nt of said antisense strand length to reduce target gene expression when said dsRNA molecule is introduced into a mammalian cell, and wherein dicer cleavage of said dsRNA preferentially results in an siRNA comprising said 3′ end of said antisense strand, thereby reducing expression of the target gene in the mammal, wherein the antisense strand contains at least one thermally destabilizing nucleotide, where the at least one thermally destabilizing nucleotide is in the seed region of the antisense strand (i.e. at position 2-9 of the 5′-end of the antisense strand), and wherein the dsRNA optionally further has at least one (e.g., one, two, three, four, five, six or all seven) of the following characteristics: (i) the antisense comprises 2, 3, 4, 5, or 6 2′-fluoro modifications; (ii) the antisense comprises 1, 2, 3, 4, or 5 phosphorothioate internucleotide linkages; (iii) the sense strand is conjugated with a ligand; (iv) the sense strand comprises 2, 3, 4, or 5 2′-fluoro modifications; (v) the sense strand comprises 1, 2, 3, 4, or 5 phosphorothioate internucleotide linkages; and (vi) the dsRNA comprises at least four 2′-fluoro modifications; and (vii) the dsRNA has a duplex region of 12-29 nucleotide pairs in length.

[0475] In some embodiments, every nucleotide in the sense strand and antisense strand of the dsRNA molecule may be modified. Each nucleotide may be modified with the same or different modification which can include one or more alteration of one or both of the non-linking phosphate oxygens or of one or more of the linking phosphate oxygens; alteration of a constituent of the ribose sugar, e.g., of the 2′ hydroxyl on the ribose sugar; wholesale replacement of the phosphate moiety with “dephospho” linkers; modification or replacement of a naturally occurring base; and replacement or modification of the ribose-phosphate backbone.

[0476] As nucleic acids are polymers of subunits, many of the modifications occur at a position which is repeated within a nucleic acid, e.g., a modification of a base, or a phosphate moiety, or a non-linking O of a phosphate moiety. In some cases, the modification will occur at all of the subject positions in the nucleic acid but in many cases it will not. By way of example, a modification may only occur at a 3′ or 5′ terminal position, may only occur in a terminal region, e.g., at a position on a terminal nucleotide or in the last 2, 3, 4, 5, or 10 nucleotides of a strand. A modification may occur in a double strand region, a single strand region, or in both. A modification may occur only in the double strand region of an RNA or may only occur in a single strand region of an RNA. E.g., a phosphorothioate modification at a non-linking O position may only occur at one or both termini, may only occur in a terminal region, e.g., at a position on a terminal nucleotide or in the last 2, 3, 4, 5, or 10 nucleotides of a strand, or may occur in double strand and single strand regions, particularly at termini. The 5′ end or ends can be phosphorylated.

[0477] It may be possible, e.g., to enhance stability, to include particular bases in overhangs, or to include modified nucleotides or nucleotide surrogates, in single strand overhangs, e.g., in a 5′ or 3′ overhang, or in both. E.g., it can be desirable to include purine nucleotides in overhangs. In some embodiments all or some of the bases in a 3′ or 5′ overhang may be modified, e.g., with a modification described herein. Modifications can include, e.g., the use of modifications at the 2′ position of the ribose sugar with modifications that are known in the art, e.g., the use of deoxyribonucleotides, 2′-deoxy-2′-fluoro (2′-F) or 2′-O-methyl modified instead of the ribosugar of the nucleobase, and modifications in the phosphate group, e.g., phosphorothioate modifications. Overhangs need not be homologous with the target sequence.

[0478] In some embodiments, each residue of the sense strand and antisense strand is independently modified with LNA, HNA, CeNA, 2′-methoxyethyl, 2′-O-methyl, 2′-O-allyl, 2′-C-allyl, 2′-deoxy, or 2′-fluoro. The strands can contain more than one modification. In some embodiments, each residue of the sense strand and antisense strand is independently modified with 2′-O-methyl or 2′-fluoro. It is to be understood that these modifications are in addition to the at least one thermally destabilizing modification of the duplex present in the antisense strand.

[0479] At least two different modifications are typically present on the sense strand and antisense strand. Those two modifications may be the 2′-deoxy, 2′-O-methyl or 2′-fluoro modifications, acyclic nucleotides or others. In some embodiments, the sense strand and antisense strand each comprises two differently modified nucleotides selected from 2′-O-methyl or 2′-deoxy. In some embodiments, each residue of the sense strand and antisense strand is independently modified with 2′-O-methyl nucleotide, 2′-deoxy nucleotide, 2′-deoxy-2′-fluoro nucleotide, 2′-O—N-methylacetamido (2′-O-NMA) nucleotide, a 2′-O-dimethylaminoethoxyethyl (2′-O-DMAEOE) nucleotide, 2′-O-aminopropyl (2′-O-AP) nucleotide, or 2′-ara-F nucleotide. Again, it is to be understood that these modifications are in addition to the at least one thermally destabilizing modification of the duplex present in the antisense strand.

[0480] In some embodiments, the dsRNA molecule of the disclosure comprises modifications of an alternating pattern, particular in the B1, B2, B3, B1′, B2′, B3′, B4′ regions. The term “alternating motif” or “alternative pattern” as used herein refers to a motif having one or more modifications, each modification occurring on alternating nucleotides of one strand. The alternating nucleotide may refer to one per every other nucleotide or one per every three nucleotides, or a similar pattern. For example, if A, B and C each represent one type of modification to the nucleotide, the alternating motif can be “ABABABABABAB . . . ,” “AABBAABBAABB . . . ,” “AABAABAABAAB . . . ,” “AAABAAABAAAB . . . ,” “AAABBBAAABBB . . . ,” or “ABCABCABCABC . . . ,” etc.

The type of modifications contained in the alternating motif may be the same or different. For example, if A, B, C, D each represent one type of modification on the nucleotide, the alternating pattern, i.e., modifications on every other nucleotide, may be the same, but each of the sense strand or antisense strand can be selected from several possibilities of modifications within the alternating motif such as “ABABAB . . . ”, “ACACAC . . . ” “BDBDBD . . . ” or “CDCDCD . . . ,” etc.

[0481] In some embodiments, the dsRNA molecule of the disclosure comprises the modification pattern for the alternating motif on the sense strand relative to the modification pattern for the alternating motif on the antisense strand is shifted. The shift may be such that the modified group of nucleotides of the sense strand corresponds to a differently modified group of nucleotides of the antisense strand and vice versa. For example, the sense strand when paired with the antisense strand in the dsRNA duplex, the alternating motif in the sense strand may start with “ABABAB” from 5′-3′ of the strand and the alternating motif in the antisense strand may start with “BABABA” from 3′-5′ of the strand within the duplex region. As another example, the alternating motif in the sense strand may start with “AABBAABB” from 5′-3′ of the strand and the alternating motif in the antisense strand may start with “BBAABBAA” from 3′-5′ of the strand within the duplex region, so that there is a complete or partial shift of the modification patterns between the sense strand and the antisense strand.

[0482] The dsRNA molecule of the disclosure may further comprise at least one phosphorothioate or methylphosphonate internucleotide linkage. The phosphorothioate or methylphosphonate internucleotide linkage modification may occur on any nucleotide of the sense strand or antisense strand or both in any position of the strand. For instance, the internucleotide linkage modification may occur on every nucleotide on the sense strand or antisense strand; each internucleotide linkage modification may occur in an alternating pattern on the sense strand or antisense strand; or the sense strand or antisense strand comprises both internucleotide linkage modifications in an alternating pattern. The alternating pattern of the internucleotide linkage modification on the sense strand may be the same or different from the antisense strand, and the alternating pattern of the internucleotide linkage modification on the sense strand may have a shift relative to the alternating pattern of the internucleotide linkage modification on the antisense strand.

[0483] In some embodiments, the dsRNA molecule comprises the phosphorothioate or methylphosphonate internucleotide linkage modification in the overhang region. For example, the overhang region comprises two nucleotides having a phosphorothioate or methylphosphonate internucleotide linkage between the two nucleotides. Internucleotide linkage modifications also may be made to link the overhang nucleotides with the terminal paired nucleotides within duplex region. For example, at least 2, 3, 4, or all the overhang nucleotides may be linked through phosphorothioate or methylphosphonate internucleotide linkage, and optionally, there may be additional phosphorothioate or methylphosphonate internucleotide linkages linking the overhang nucleotide with a paired nucleotide that is next to the overhang nucleotide. For instance, there may be at least two phosphorothioate internucleotide linkages between the terminal three nucleotides, in which two of the three nucleotides are overhang nucleotides, and the third is a paired nucleotide next to the overhang nucleotide. Preferably, these terminal three nucleotides may be at the 3′-end of the antisense strand.

[0484] In some embodiments, the sense strand of the dsRNA molecule comprises 1-10 blocks of two to ten phosphorothioate or methylphosphonate internucleotide linkages separated by 1, 2, 3, 4, 5, 6, 7, 8, 9, 10, 11, 12, 13, 14, 15, or 16 phosphate internucleotide linkages, wherein one of the phosphorothioate or methylphosphonate internucleotide linkages is placed at any position in the oligonucleotide sequence and the said sense strand is paired with an antisense strand comprising any combination of phosphorothioate, methylphosphonate and phosphate internucleotide linkages or an antisense strand comprising either phosphorothioate or methylphosphonate or phosphate linkage.

[0485] In some embodiments, the antisense strand of the dsRNA molecule comprises two blocks of two phosphorothioate or methylphosphonate internucleotide linkages separated by 1, 2, 3, 4, 5, 6, 7, 8, 9, 10, 11, 12, 13, 14, 15, 16, 17, or 18 phosphate internucleotide linkages, wherein one of the phosphorothioate or methylphosphonate internucleotide linkages is placed at any position in the oligonucleotide sequence and the said antisense strand is paired with a sense strand comprising any combination of phosphorothioate, methylphosphonate and phosphate internucleotide linkages or an antisense strand comprising either phosphorothioate or methylphosphonate or phosphate linkage.

[0486] In some embodiments, the antisense strand of the dsRNA molecule comprises two blocks of three phosphorothioate or methylphosphonate internucleotide linkages separated by 1, 2, 3, 4, 5, 6, 7, 8, 9, 10, 11, 12, 13, 14, 15, or 16 phosphate internucleotide linkages, wherein one of the phosphorothioate or methylphosphonate internucleotide linkages is placed at any position in the oligonucleotide sequence and the said antisense strand is paired with a sense strand comprising any combination of phosphorothioate, methylphosphonate and phosphate internucleotide linkages or an antisense strand comprising either phosphorothioate or methylphosphonate or phosphate linkage.

[0487] In some embodiments, the antisense strand of the dsRNA molecule comprises two blocks of four phosphorothioate or methylphosphonate internucleotide linkages separated by 1, 2, 3, 4, 5, 6, 7, 8, 9, 10, 11, 12, 13, or 14 phosphate internucleotide linkages, wherein one of the phosphorothioate or methylphosphonate internucleotide linkages is placed at any position in the oligonucleotide sequence and the said antisense strand is paired with a sense strand comprising any combination of phosphorothioate, methylphosphonate and phosphate internucleotide linkages or an antisense strand comprising either phosphorothioate or methylphosphonate or phosphate linkage.

[0488] In some embodiments, the antisense strand of the dsRNA molecule comprises two blocks of five phosphorothioate or methylphosphonate internucleotide linkages separated by 1, 2, 3, 4, 5, 6, 7, 8, 9, 10, 11, or 12 phosphate internucleotide linkages, wherein one of the phosphorothioate or methylphosphonate internucleotide linkages is placed at any position in the oligonucleotide sequence and the said antisense strand is paired with a sense strand comprising any combination of phosphorothioate, methylphosphonate and phosphate internucleotide linkages or an antisense strand comprising either phosphorothioate or methylphosphonate or phosphate linkage.

[0489] In some embodiments, the antisense strand of the dsRNA molecule comprises two blocks of six phosphorothioate or methylphosphonate internucleotide linkages separated by 1, 2, 3, 4, 5, 6, 7, 8, 9, or 10 phosphate internucleotide linkages, wherein one of the phosphorothioate or methylphosphonate internucleotide linkages is placed at any position in the oligonucleotide sequence and the said antisense strand is paired with a sense strand comprising any combination of phosphorothioate, methylphosphonate and phosphate internucleotide linkages or an antisense strand comprising either phosphorothioate or methylphosphonate or phosphate linkage.

[0490] In some embodiments, the antisense strand of the dsRNA molecule comprises two blocks of seven phosphorothioate or methylphosphonate internucleotide linkages separated by 1, 2, 3, 4, 5, 6, 7, or 8 phosphate internucleotide linkages, wherein one of the phosphorothioate or methylphosphonate internucleotide linkages is placed at any position in the oligonucleotide sequence and the said antisense strand is paired with a sense strand comprising any combination of phosphorothioate, methylphosphonate and phosphate internucleotide linkages or an antisense strand comprising either phosphorothioate or methylphosphonate or phosphate linkage.

[0491] In some embodiments, the antisense strand of the dsRNA molecule comprises two blocks of eight phosphorothioate or methylphosphonate internucleotide linkages separated by 1, 2, 3, 4, 5, or 6 phosphate internucleotide linkages, wherein one of the phosphorothioate or methylphosphonate internucleotide linkages is placed at any position in the oligonucleotide sequence and the said antisense strand is paired with a sense strand comprising any combination of phosphorothioate, methylphosphonate and phosphate internucleotide linkages or an antisense strand comprising either phosphorothioate or methylphosphonate or phosphate linkage.

[0492] In some embodiments, the antisense strand of the dsRNA molecule comprises two blocks of nine phosphorothioate or methylphosphonate internucleotide linkages separated by 1, 2, 3, or 4 phosphate internucleotide linkages, wherein one of the phosphorothioate or methylphosphonate internucleotide linkages is placed at any position in the oligonucleotide sequence and the said antisense strand is paired with a sense strand comprising any combination of phosphorothioate, methylphosphonate and phosphate internucleotide linkages or an antisense strand comprising either phosphorothioate or methylphosphonate or phosphate linkage.

[0493] In some embodiments, the dsRNA molecule of the disclosure further comprises one or more phosphorothioate or methylphosphonate internucleotide linkage modification within 1-10 of the termini position(s) of the sense or antisense strand. For example, at least 2, 3, 4, 5, 6, 7, 8, 9, or 10 nucleotides may be linked through phosphorothioate or methylphosphonate internucleotide linkage at one end or both ends of the sense or antisense strand.

[0494] In some embodiments, the dsRNA molecule of the disclosure further comprises one or more phosphorothioate or methylphosphonate internucleotide linkage modification within 1-10 of the internal region of the duplex of each of the sense or antisense strand. For example, at least 2, 3, 4, 5, 6, 7, 8, 9, or 10 nucleotides may be linked through phosphorothioate methylphosphonate internucleotide linkage at position 8-16 of the duplex region counting from the 5′-end of the sense strand; the dsRNA molecule can optionally further comprise one or more phosphorothioate or methylphosphonate internucleotide linkage modification within 1-10 of the termini position(s).

[0495] In some embodiments, the dsRNA molecule of the disclosure further comprises one to five phosphorothioate or methylphosphonate internucleotide linkage modification(s) within position 1-5 and one to five phosphorothioate or methylphosphonate internucleotide linkage modification(s) within position 18-23 of the sense strand (counting from the 5′-end), and one to five phosphorothioate or methylphosphonate internucleotide linkage modification at positions 1 and 2 and one to five within positions 18-23 of the antisense strand (counting from the 5′-end).

[0496] In some embodiments, the dsRNA molecule of the disclosure further comprises one phosphorothioate internucleotide linkage modification within position 1-5 and one phosphorothioate or methylphosphonate internucleotide linkage modification within position 18-23 of the sense strand (counting from the 5′-end), and one phosphorothioate internucleotide linkage modification at positions 1 and 2 and two phosphorothioate or methylphosphonate internucleotide linkage modifications within positions 18-23 of the antisense strand (counting from the 5′-end).

[0497] In some embodiments, the dsRNA molecule of the disclosure further comprises two phosphorothioate internucleotide linkage modifications within position 1-5 and one phosphorothioate internucleotide linkage modification within position 18-23 of the sense strand (counting from the 5′-end), and one phosphorothioate internucleotide linkage modification at positions 1 and 2 and two phosphorothioate internucleotide linkage modifications within positions 18-23 of the antisense strand (counting from the 5′-end).

[0498] In some embodiments, the dsRNA molecule of the disclosure further comprises two phosphorothioate internucleotide linkage modifications within position 1-5 and two phosphorothioate internucleotide linkage modifications within position 18-23 of the sense strand (counting from the 5′-end), and one phosphorothioate internucleotide linkage modification at positions 1 and 2 and two phosphorothioate internucleotide linkage modifications within positions 18-23 of the antisense strand (counting from the 5′-end).

[0499] In some embodiments, the dsRNA molecule of the disclosure further comprises two phosphorothioate internucleotide linkage modifications within position 1-5 and two phosphorothioate internucleotide linkage modifications within position 18-23 of the sense strand (counting from the 5′-end), and one phosphorothioate internucleotide linkage modification at positions 1 and 2 and one phosphorothioate internucleotide linkage modification within positions 18-23 of the antisense strand (counting from the 5′-end).

[0500] In some embodiments, the dsRNA molecule of the disclosure further comprises one phosphorothioate internucleotide linkage modification within position 1-5 and one phosphorothioate internucleotide linkage modification within position 18-23 of the sense strand (counting from the 5′-end), and two phosphorothioate internucleotide linkage modifications at positions 1 and 2 and two phosphorothioate internucleotide linkage modifications within positions 18-23 of the antisense strand (counting from the 5′-end).

[0501] In some embodiments, the dsRNA molecule of the disclosure further comprises one phosphorothioate internucleotide linkage modification within position 1-5 and one within position 18-23 of the sense strand (counting from the 5′-end), and two phosphorothioate internucleotide linkage modification at positions 1 and 2 and one phosphorothioate internucleotide linkage modification within positions 18-23 of the antisense strand (counting from the 5′-end).

[0502] In some embodiments, the dsRNA molecule of the disclosure further comprises one phosphorothioate internucleotide linkage modification within position 1-5 (counting from the 5′-end) of the sense strand, and two phosphorothioate internucleotide linkage modifications at positions 1 and 2 and one phosphorothioate internucleotide linkage modification within positions 18-23 of the antisense strand (counting from the 5′-end).

[0503] In some embodiments, the dsRNA molecule of the disclosure further comprises two phosphorothioate internucleotide linkage modifications within position 1-5 (counting from the 5′-end) of the sense strand, and one phosphorothioate internucleotide linkage modification at positions 1 and 2 and two phosphorothioate internucleotide linkage modifications within positions 18-23 of the antisense strand (counting from the 5′-end).

[0504] In some embodiments, the dsRNA molecule of the disclosure further comprises two phosphorothioate internucleotide linkage modifications within position 1-5 and one within position 18-23 of the sense strand (counting from the 5′-end), and two phosphorothioate internucleotide linkage modifications at positions 1 and 2 and one phosphorothioate internucleotide linkage modification within positions 18-23 of the antisense strand (counting from the 5′-end).

[0505] In some embodiments, the dsRNA molecule of the disclosure further comprises two phosphorothioate internucleotide linkage modifications within position 1-5 and one phosphorothioate internucleotide linkage modification within position 18-23 of the sense strand (counting from the 5′-end), and two phosphorothioate internucleotide linkage modifications at positions 1 and 2 and two phosphorothioate internucleotide linkage modifications within positions 18-23 of the antisense strand (counting from the 5′-end).

[0506] In some embodiments, the dsRNA molecule of the disclosure further comprises two phosphorothioate internucleotide linkage modifications within position 1-5 and one phosphorothioate internucleotide linkage modification within position 18-23 of the sense strand (counting from the 5′-end), and one phosphorothioate internucleotide linkage modification at positions 1 and 2 and two phosphorothioate internucleotide linkage modifications within positions 18-23 of the antisense strand (counting from the 5′-end).

[0507] In some embodiments, the dsRNA molecule of the disclosure further comprises two phosphorothioate internucleotide linkage modifications at position 1 and 2, and two phosphorothioate internucleotide linkage modifications at position 20 and 21 of the sense strand (counting from the 5′-end), and one phosphorothioate internucleotide linkage modification at positions 1 and one at position 21 of the antisense strand (counting from the 5′-end).

[0508] In some embodiments, the dsRNA molecule of the disclosure further comprises one phosphorothioate internucleotide linkage modification at position 1, and one phosphorothioate internucleotide linkage modification at position 21 of the sense strand (counting from the 5′-end), and two phosphorothioate internucleotide linkage modifications at positions 1 and 2 and two phosphorothioate internucleotide linkage modifications at positions 20 and 21 the antisense strand (counting from the 5′-end).

[0509] In some embodiments, the dsRNA molecule of the disclosure further comprises two phosphorothioate internucleotide linkage modifications at position 1 and 2, and two phosphorothioate internucleotide linkage modifications at position 21 and 22 of the sense strand (counting from the 5′-end), and one phosphorothioate internucleotide linkage modification at positions 1 and one phosphorothioate internucleotide linkage modification at position 21 of the antisense strand (counting from the 5′-end).

[0510] In some embodiments, the dsRNA molecule of the disclosure further comprises one phosphorothioate internucleotide linkage modification at position 1, and one phosphorothioate internucleotide linkage modification at position 21 of the sense strand (counting from the 5′-end), and two phosphorothioate internucleotide linkage modifications at positions 1 and 2 and two phosphorothioate internucleotide linkage modifications at positions 21 and 22 the antisense strand (counting from the 5′-end).

[0511] In some embodiments, the dsRNA molecule of the disclosure further comprises two phosphorothioate internucleotide linkage modifications at position 1 and 2, and two phosphorothioate internucleotide linkage modifications at position 22 and 23 of the sense strand (counting from the 5′-end), and one phosphorothioate internucleotide linkage modification at positions 1 and one phosphorothioate internucleotide linkage modification at position 21 of the antisense strand (counting from the 5′-end).

[0512] In some embodiments, the dsRNA molecule of the disclosure further comprises one phosphorothioate internucleotide linkage modification at position 1, and one phosphorothioate internucleotide linkage modification at position 21 of the sense strand (counting from the 5′-end), and two phosphorothioate internucleotide linkage modifications at positions 1 and 2 and two phosphorothioate internucleotide linkage modifications at positions 23 and 23 the antisense strand (counting from the 5′-end).

[0513] In some embodiments, compound of the disclosure comprises a pattern of backbone chiral centers. In some embodiments, a common pattern of backbone chiral centers comprises at least 5 internucleotidic linkages in the Sp configuration. In some embodiments, a common pattern of backbone chiral centers comprises at least 6 internucleotidic linkages in the Sp configuration. In some embodiments, a common pattern of backbone chiral centers comprises at least 7 internucleotidic linkages in the Sp configuration. In some embodiments, a common pattern of backbone chiral centers comprises at least 8 internucleotidic linkages in the Sp configuration. In some embodiments, a common pattern of backbone chiral centers comprises at least 9 internucleotidic linkages in the Sp configuration. In some embodiments, a common pattern of backbone chiral centers comprises at least 10 internucleotidic linkages in the Sp configuration. In some embodiments, a common pattern of backbone chiral centers comprises at least 11 internucleotidic linkages in the Sp configuration. In some embodiments, a common pattern of backbone chiral centers comprises at least 12 internucleotidic linkages in the Sp configuration. In some embodiments, a common pattern of backbone chiral centers comprises at least 13 internucleotidic linkages in the Sp configuration. In some embodiments, a common pattern of backbone chiral centers comprises at least 14 internucleotidic linkages in the Sp configuration. In some embodiments, a common pattern of backbone chiral centers comprises at least 15 internucleotidic linkages in the Sp configuration. In some embodiments, a common pattern of backbone chiral centers comprises at least 16 internucleotidic linkages in the Sp configuration. In some embodiments, a common pattern of backbone chiral centers comprises at least 17 internucleotidic linkages in the Sp configuration. In some embodiments, a common pattern of backbone chiral centers comprises at least 18 internucleotidic linkages in the Sp configuration. In some embodiments, a common pattern of backbone chiral centers comprises at least 19 internucleotidic linkages in the Sp configuration. In some embodiments, a common pattern of backbone chiral centers comprises no more than 8 internucleotidic linkages in the Rp configuration. In some embodiments, a common pattern of backbone chiral centers comprises no more than 7 internucleotidic linkages in the Rp configuration. In some embodiments, a common pattern of backbone chiral centers comprises no more than 6 internucleotidic linkages in the Rp configuration. In some embodiments, a common pattern of backbone chiral centers comprises no more than 5 internucleotidic linkages in the Rp configuration. In some embodiments, a common pattern of backbone chiral centers comprises no more than 4 internucleotidic linkages in the Rp configuration. In some embodiments, a common pattern of backbone chiral centers comprises no more than 3 internucleotidic linkages in the Rp configuration. In some embodiments, a common pattern of backbone chiral centers comprises no more than 2 internucleotidic linkages in the Rp configuration. In some embodiments, a common pattern of backbone chiral centers comprises no more than 1 internucleotidic linkages in the Rp configuration. In some embodiments, a common pattern of backbone chiral centers comprises no more than 8 internucleotidic linkages which are not chiral (as a non-limiting example, a phosphodiester). In some embodiments, a common pattern of backbone chiral centers comprises no more than 7 internucleotidic linkages which are not chiral. In some embodiments, a common pattern of backbone chiral centers comprises no more than 6 internucleotidic linkages which are not chiral. In some embodiments, a common pattern of backbone chiral centers comprises no more than 5 internucleotidic linkages which are not chiral. In some embodiments, a common pattern of backbone chiral centers comprises no more than 4 internucleotidic linkages which are not chiral. In some embodiments, a common pattern of backbone chiral centers comprises no more than 3 internucleotidic linkages which are not chiral. In some embodiments, a common pattern of backbone chiral centers comprises no more than 2 internucleotidic linkages which are not chiral. In some embodiments, a common pattern of backbone chiral centers comprises no more than 1 internucleotidic linkages which are not chiral. In some embodiments, a common pattern of backbone chiral centers comprises at least 10 internucleotidic linkages in the Sp configuration, and no more than 8 internucleotidic linkages which are not chiral. In some embodiments, a common pattern of backbone chiral centers comprises at least 11 internucleotidic linkages in the Sp configuration, and no more than 7 internucleotidic linkages which are not chiral. In some embodiments, a common pattern of backbone chiral centers comprises at least 12 internucleotidic linkages in the Sp configuration, and no more than 6 internucleotidic linkages which are not chiral. In some embodiments, a common pattern of backbone chiral centers comprises at least 13 internucleotidic linkages in the Sp configuration, and no more than 6 internucleotidic linkages which are not chiral. In some embodiments, a common pattern of backbone chiral centers comprises at least 14 internucleotidic linkages in the Sp configuration, and no more than 5 internucleotidic linkages which are not chiral. In some embodiments, a common pattern of backbone chiral centers comprises at least 15 internucleotidic linkages in the Sp configuration, and no more than 4 internucleotidic linkages which are not chiral. In some embodiments, the internucleotidic linkages in the Sp configuration are optionally contiguous or not contiguous. In some embodiments, the internucleotidic linkages in the Rp configuration are optionally contiguous or not contiguous. In some embodiments, the internucleotidic linkages which are not chiral are optionally contiguous or not contiguous.

[0514] In some embodiments, compound of the disclosure comprises a block is a stereochemistry block. In some embodiments, a block is an Rp block in that each internucleotidic linkage of the block is Rp. In some embodiments, a 5′-block is an Rp block. In some embodiments, a 3′-block is an Rp block. In some embodiments, a block is an Sp block in that each internucleotidic linkage of the block is Sp. In some embodiments, a 5′-block is an Sp block. In some embodiments, a 3′-block is an Sp block. In some embodiments, provided oligonucleotides comprise both Rp and Sp blocks. In some embodiments, provided oligonucleotides comprise one or more Rp but no Sp blocks. In some embodiments, provided oligonucleotides comprise one or more Sp but no Rp blocks. In some embodiments, provided oligonucleotides comprise one or more PO blocks wherein each internucleotidic linkage in a natural phosphate linkage.

[0515] In some embodiments, compound of the disclosure comprises a 5′-block is an Sp block wherein each sugar moiety comprises a 2′-F modification. In some embodiments, a 5′-block is an Sp block wherein each of internucleotidic linkage is a modified internucleotidic linkage and each sugar moiety comprises a 2′-F modification. In some embodiments, a 5′-block is an Sp block wherein each of internucleotidic linkage is a phosphorothioate linkage and each sugar moiety comprises a 2′-F modification. In some embodiments, a 5′-block comprises 4 or more nucleoside units. In some embodiments, a 5′-block comprises 5 or more nucleoside units. In some embodiments, a 5′-block comprises 6 or more nucleoside units. In some embodiments, a 5′-block comprises 7 or more nucleoside units. In some embodiments, a 3′-block is an Sp block wherein each sugar moiety comprises a 2′-F modification. In some embodiments, a 3′-block is an Sp block wherein each of internucleotidic linkage is a modified internucleotidic linkage and each sugar moiety comprises a 2′-F modification. In some embodiments, a 3′-block is an Sp block wherein each of internucleotidic linkage is a phosphorothioate linkage and each sugar moiety comprises a 2′-F modification. In some embodiments, a 3′-block comprises 4 or more nucleoside units. In some embodiments, a 3′-block comprises 5 or more nucleoside units. In some embodiments, a 3′-block comprises 6 or more nucleoside units. In some embodiments, a 3′-block comprises 7 or more nucleoside units.

[0516] In some embodiments, compound of the disclosure comprises a type of nucleoside in a region or an oligonucleotide is followed by a specific type of internucleotidic linkage, e.g., natural phosphate linkage, modified internucleotidic linkage, Rp chiral internucleotidic linkage, Sp chiral internucleotidic linkage, etc. In some embodiments, A is followed by Sp. In some embodiments, A is followed by Rp. In some embodiments, A is followed by natural phosphate linkage (PO). In some embodiments, U is followed by Sp. In some embodiments, U is followed by Rp. In some embodiments, U is followed by natural phosphate linkage (PO). In some embodiments, C is followed by Sp. In some embodiments, C is followed by Rp. In some embodiments, C is followed by natural phosphate linkage (PO). In some embodiments, G is followed by Sp. In some embodiments, G is followed by Rp. In some embodiments, G is followed by natural phosphate linkage (PO). In some embodiments, C and U are followed by Sp. In some embodiments, C and U are followed by Rp. In some embodiments, C and U are followed by natural phosphate linkage (PO). In some embodiments, A and G are followed by Sp. In some embodiments, A and G are followed by Rp.

[0517] In some embodiments, the antisense strand comprises phosphorothioate internucleotide linkages between nucleotide positions 21 and 22, and between nucleotide positions 22 and 23, wherein the antisense strand contains at least one thermally destabilizing modification of the duplex located in the seed region of the antisense strand (i.e., at position 2-9 of the 5′-end of the antisense strand), and wherein the dsRNA optionally further has at least one (e.g., one, two, three, four, five, six, seven or all eight) of the following characteristics: (i) the antisense comprises 2, 3, 4, 5 or 6 2′-fluoro modifications; (ii) the antisense comprises 3, 4 or 5 phosphorothioate internucleotide linkages; (iii) the sense strand is conjugated with a ligand; (iv) the sense strand comprises 2, 3, 4 or 5 2′-fluoro modifications; (v) the sense strand comprises 1, 2, 3, 4 or 5 phosphorothioate internucleotide linkages; (vi) the dsRNA comprises at least four 2′-fluoro modifications; (vii) the dsRNA comprises a duplex region of 12-40 nucleotide pairs in length; and (viii) the dsRNA has a blunt end at 5′-end of the antisense strand.

[0518] In some embodiments, the antisense strand comprises phosphorothioate internucleotide linkages between nucleotide positions 1 and 2, between nucleotide positions 2 and 3, between nucleotide positions 21 and 22, and between nucleotide positions 22 and 23, wherein the antisense strand contains at least one thermally destabilizing modification of the duplex located in the seed region of the antisense strand (i.e., at position 2-9 of the 5′-end of the antisense strand), and wherein the dsRNA optionally further has at least one (e.g., one, two, three, four, five, six, seven or all eight) of the following characteristics: (i) the antisense comprises 2, 3, 4, 5 or 6 2′-fluoro modifications; (ii) the sense strand is conjugated with a ligand; (iii) the sense strand comprises 2, 3, 4 or 5 2′-fluoro modifications; (iv) the sense strand comprises 1, 2, 3, 4 or 5 phosphorothioate internucleotide linkages; (v) the dsRNA comprises at least four 2′-fluoro modifications; (vi) the dsRNA comprises a duplex region of 12-40 nucleotide pairs in length; (vii) the dsRNA comprises a duplex region of 12-40 nucleotide pairs in length; and (viii) the dsRNA has a blunt end at 5′-end of the antisense strand.

[0519] In some embodiments, the sense strand comprises phosphorothioate internucleotide linkages between nucleotide positions 1 and 2, and between nucleotide positions 2 and 3, wherein the antisense strand contains at least one thermally destabilizing modification of the duplex located in the seed region of the antisense strand (i.e., at position 2-9 of the 5′-end of the antisense strand), and wherein the dsRNA optionally further has at least one (e.g., one, two, three, four, five, six, seven or all eight) of the following characteristics: (i) the antisense comprises 2, 3, 4, 5 or 6 2′-fluoro modifications; (ii) the antisense comprises 1, 2, 3, 4 or 5 phosphorothioate internucleotide linkages; (iii) the sense strand is conjugated with a ligand; (iv) the sense strand comprises 2, 3, 4 or 5 2′-fluoro modifications; (v) the sense strand comprises 3, 4 or 5 phosphorothioate internucleotide linkages; (vi) the dsRNA comprises at least four 2′-fluoro modifications; (vii) the dsRNA comprises a duplex region of 12-40 nucleotide pairs in length; and (viii) the dsRNA has a blunt end at 5′-end of the antisense strand.

[0520] In some embodiments, the sense strand comprises phosphorothioate internucleotide linkages between nucleotide positions 1 and 2, and between nucleotide positions 2 and 3, the antisense strand comprises phosphorothioate internucleotide linkages between nucleotide positions 1 and 2, between nucleotide positions 2 and 3, between nucleotide positions 21 and 22, and between nucleotide positions 22 and 23, wherein the antisense strand contains at least one thermally destabilizing modification of the duplex located in the seed region of the antisense strand (i.e., at position 2-9 of the 5′-end of the antisense strand), and wherein the dsRNA optionally further has at least one (e.g., one, two, three, four, five, six or all seven) of the following characteristics: (i) the antisense comprises 2, 3, 4, 5 or 6 2′-fluoro modifications; (ii) the sense strand is conjugated with a ligand; (iii) the sense strand comprises 2, 3, 4 or 5 2′-fluoro modifications; (iv) the sense strand comprises 3, 4 or 5 phosphorothioate internucleotide linkages; (v) the dsRNA comprises at least four 2′-fluoro modifications; (vi) the dsRNA comprises a duplex region of 12-40 nucleotide pairs in length; and (vii) the dsRNA has a blunt end at 5′-end of the antisense strand.

[0521] In some embodiments, the dsRNA molecule of the disclosure comprises mismatch(es) with the target, within the duplex, or combinations thereof. The mismatch can occur in the overhang region or the duplex region. The base pair can be ranked on the basis of their propensity to promote dissociation or melting (e.g., on the free energy of association or dissociation of a particular pairing, the simplest approach is to examine the pairs on an individual pair basis, though next neighbor or similar analysis can also be used). In terms of promoting dissociation: A:U is preferred over G:C; G:U is preferred over G:C; and I:C is preferred over G:C (I=inosine). Mismatches, e.g., non-canonical or other than canonical pairings (as described elsewhere herein) are preferred over canonical (A:T, A:U, G:C) pairings; and pairings which include a universal base are preferred over canonical pairings.

[0522] In some embodiments, the dsRNA molecule of the disclosure comprises at least one of the first 1, 2, 3, 4, or 5 base pairs within the duplex regions from the 5′-end of the antisense strand can be chosen independently from the group of: A:U, G:U, I:C, and mismatched pairs, e.g., non-canonical or other than canonical pairings or pairings which include a universal base, to promote the dissociation of the antisense strand at the 5′-end of the duplex.

[0523] In some embodiments, the nucleotide at the 1 position within the duplex region from the 5′-end in the antisense strand is selected from the group consisting of A, dA, dU, U, and dT.

[0524] Alternatively, at least one of the first 1, 2 or 3 base pair within the duplex region from the 5′-end of the antisense strand is an AU base pair. For example, the first base pair within the duplex region from the 5′-end of the antisense strand is an AU base pair.

[0525] It was found that introducing 4′-modified or 5′-modified nucleotide to the 3′-end of a phosphodiester (PO), phosphorothioate (PS), or phosphorodithioate (PS2) linkage of a dinucleotide at any position of single stranded or double stranded oligonucleotide can exert steric effect to the internucleotide linkage and, hence, protecting or stabilizing it against nucleases.

[0526] In some embodiments, 5′-modified nucleoside is introduced at the 3′-end of a dinucleotide at any position of single stranded or double stranded siRNA. For instance, a 5′-alkylated nucleoside may be introduced at the 3′-end of a dinucleotide at any position of single stranded or double stranded siRNA. The alkyl group at the 5′ position of the ribose sugar can be racemic or chirally pure R or S isomer. An exemplary 5′-alkylated nucleoside is 5′-methyl nucleoside. The 5′-methyl can be either racemic or chirally pure R or S isomer.

[0527] In some embodiments, 4′-modified nucleoside is introduced at the 3′-end of a dinucleotide at any position of single stranded or double stranded siRNA. For instance, a 4′-alkylated nucleoside may be introduced at the 3′-end of a dinucleotide at any position of single stranded or double stranded siRNA. The alkyl group at the 4′ position of the ribose sugar can be racemic or chirally pure R or S isomer. An exemplary 4′-alkylated nucleoside is 4′-methyl nucleoside. The 4′-methyl can be either racemic or chirally pure R or S isomer. Alternatively, a 4′-O-alkylated nucleoside may be introduced at the 3′-end of a dinucleotide at any position of single stranded or double stranded siRNA. The 4′-O-alkyl of the ribose sugar can be racemic or chirally pure R or S isomer. An exemplary 4′-O-alkylated nucleoside is 4′-O-methyl nucleoside. The 4′-O-methyl can be either racemic or chirally pure R or S isomer.

[0528] In some embodiments, 5′-alkylated nucleoside is introduced at any position on the sense strand or antisense strand of a dsRNA, and such modification maintains or improves potency of the dsRNA. The 5′-alkyl can be either racemic or chirally pure R or S isomer. An exemplary 5′-alkylated nucleoside is 5′-methyl nucleoside. The 5′-methyl can be either racemic or chirally pure R or S isomer.

[0529] In some embodiments, 4′-alkylated nucleoside is introduced at any position on the sense strand or antisense strand of a dsRNA, and such modification maintains or improves potency of the dsRNA. The 4′-alkyl can be either racemic or chirally pure R or S isomer. An exemplary 4′-alkylated nucleoside is 4′-methyl nucleoside. The 4′-methyl can be either racemic or chirally pure R or S isomer.

[0530] In some embodiments, 4′-O-alkylated nucleoside is introduced at any position on the sense strand or antisense strand of a dsRNA, and such modification maintains or improves potency of the dsRNA. The 5′-alkyl can be either racemic or chirally pure R or S isomer. An exemplary 4′-O-alkylated nucleoside is 4′-O-methyl nucleoside. The 4′-O-methyl can be either racemic or chirally pure R or S isomer.

[0531] In some embodiments, the dsRNA molecule of the disclosure can comprise 2′-5′ linkages (with 2′-H, 2′-OH and 2′-OMe and with P═O or P═S). For example, the 2′-5′ linkages modifications can be used to promote nuclease resistance or to inhibit binding of the sense to the antisense strand, or can be used at the 5′ end of the sense strand to avoid sense strand activation by RISC.

[0532] In another embodiment, the dsRNA molecule of the disclosure can comprise L sugars (e.g., L ribose, L-arabinose with 2′-H, 2′-OH and 2′-OMe). For example, these L sugars modifications can be used to promote nuclease resistance or to inhibit binding of the sense to the antisense strand, or can be used at the 5′ end of the sense strand to avoid sense strand activation by RISC.

[0533] Various publications describe multimeric siRNA which can all be used with the dsRNA of the disclosure. Such publications include WO2007/091269, U.S. Pat. No. 7,858,769, WO2010/141511, WO2007/117686, WO2009/014887, and WO2011/031520 which are hereby incorporated by their entirely.

[0534] As described in more detail below, the RNAi agent that contains conjugations of one or more carbohydrate moieties to an RNAi agent can optimize one or more properties of the RNAi agent. In many cases, the carbohydrate moiety will be attached to a modified subunit of the RNAi agent. For example, the ribose sugar of one or more ribonucleotide subunits of a dsRNA agent can be replaced with another moiety, e.g., a non-carbohydrate (preferably cyclic) carrier to which is attached a carbohydrate ligand. A ribonucleotide subunit in which the ribose sugar of the subunit has been so replaced is referred to herein as a ribose replacement modification subunit (RRMS). A cyclic carrier may be a carbocyclic ring system, i.e., all ring atoms are carbon atoms, or a heterocyclic ring system, i.e., one or more ring atoms may be a heteroatom, e.g., nitrogen, oxygen, sulfur. The cyclic carrier may be a monocyclic ring system, or may contain two or more rings, e.g. fused rings. The cyclic carrier may be a fully saturated ring system, or it may contain one or more double bonds.

[0535] The ligand may be attached to the polynucleotide via a carrier. The carriers include (i) at least one “backbone attachment point,” preferably two “backbone attachment points” and (ii) at least one “tethering attachment point.” A “backbone attachment point” as used herein refers to a functional group, e.g. a hydroxyl group, or generally, a bond available for, and that is suitable for incorporation of the carrier into the backbone, e.g., the phosphate, or modified phosphate, e.g., sulfur containing, backbone, of a ribonucleic acid. A “tethering attachment point” (TAP) in some embodiments refers to a constituent ring atom of the cyclic carrier, e.g., a carbon atom or a heteroatom (distinct from an atom which provides a backbone attachment point), that connects a selected moiety. The moiety can be, e.g., a carbohydrate, e.g. monosaccharide, disaccharide, trisaccharide, tetrasaccharide, oligosaccharide and polysaccharide. Optionally, the selected moiety is connected by an intervening tether to the cyclic carrier. Thus, the cyclic carrier will often include a functional group, e.g., an amino group, or generally, provide a bond, that is suitable for incorporation or tethering of another chemical entity, e.g., a ligand to the constituent ring.

[0536] The RNAi agents may be conjugated to a ligand via a carrier, wherein the carrier can be cyclic group or acyclic group; preferably, the cyclic group is selected from pyrrolidinyl, pyrazolinyl, pyrazolidinyl, imidazolinyl, imidazolidinyl, piperidinyl, piperazinyl, [1,3]dioxolane, oxazolidinyl, isoxazolidinyl, morpholinyl, thiazolidinyl, isothiazolidinyl, quinoxalinyl, pyridazinonyl, tetrahydrofuryl and decalin; preferably, the acyclic group is selected from serinol backbone or diethanolamine backbone.

[0537] In certain specific embodiments, the RNAi agent for use in the methods of the disclosure is an agent selected from the group of agents listed in any one of Tables 2-5 and 7-10. These agents may further comprise a ligand, such as one or more lipophilic moieties, one or more GalNAc derivatives, or both of one of more lipophilic moieties and one or more GalNAc derivatives.

### IV. iRNAs Conjugated to Ligands

[0538] Another modification of the RNA of an iRNA of the invention involves chemically linking to the iRNA one or more ligands, moieties or conjugates that enhance the activity, cellular distribution or cellular uptake of the iRNA, e.g., into a cell. Such moieties include but are not limited to lipid moieties such as a cholesterol moiety (Letsinger et al., Proc. Natl. Acid. Sci. USA, 1989, 86: 6553-6556), cholic acid (Manoharan et al., Biorg. Med. Chem. Let., 1994, 4:1053-1060), a thioether, e.g., beryl-S-tritylthiol (Manoharan et al., Ann. N. Y. Acad. Sci., 1992, 660:306-309; Manoharan et al., Biorg. Med. Chem. Let., 1993, 3:2765-2770), a thiocholesterol (Oberhauser et al., Nucl. Acids Res., 1992, 20:533-538), an aliphatic chain, e.g., dodecandiol or undecyl residues (Saison-Behmoaras et al., EMBO J, 1991, 10:1111-1118; Kabanov et al., FEBS Lett., 1990, 259:327-330; Svinarchuk et al., Biochimie, 1993, 75:49-54), a phospholipid, e.g., di-hexadecyl-rac-glycerol or triethyl-ammonium 1,2-di-O-hexadecyl-rac-glycero-3-phosphonate (Manoharan et al., Tetrahedron Lett., 1995, 36:3651-3654; Shea et al., Nucl. Acids Res., 1990, 18:3777-3783), a polyamine or a polyethylene glycol chain (Manoharan et al., Nucleosides & Nucleotides, 1995, 14:969-973), or adamantane acetic acid (Manoharan et al., Tetrahedron Lett., 1995, 36:3651-3654), a palmityl moiety (Mishra et al., Biochim. Biophys. Acta, 1995, 1264:229-237), or an octadecylamine or hexylamino-carbonyloxycholesterol moiety (Crooke et al., J. Pharmacol. Exp. Ther., 1996, 277:923-937).

[0539] In certain embodiments, a ligand alters the distribution, targeting or lifetime of an iRNA agent into which it is incorporated. In some embodiments, a ligand provides an enhanced affinity for a selected target, e.g., molecule, cell or cell type, compartment, e.g., a cellular or organ compartment, tissue, organ or region of the body, as, e.g., compared to a species absent such a ligand. Typical ligands will not take part in duplex pairing in a duplexed nucleic acid.

[0540] Ligands can include a naturally occurring substance, such as a protein (e.g., human serum albumin (HSA), low-density lipoprotein (LDL), or globulin); carbohydrate (e.g., a dextran, pullulan, chitin, chitosan, inulin, cyclodextrin or hyaluronic acid); or a lipid. The ligand may also be a recombinant or synthetic molecule, such as a synthetic polymer, e.g., a synthetic polyamino acid. Examples of polyamino acids include polyamino acid is a polylysine (PLL), poly L-aspartic acid, poly L-glutamic acid, styrene-maleic acid anhydride copolymer, poly(L-lactide-co-glycolied) copolymer, divinyl ether-maleic anhydride copolymer, N-(2-hydroxypropyl)methacrylamide copolymer (HMPA), polyethylene glycol (PEG), polyvinyl alcohol (PVA), polyurethane, poly(2-ethylacryllic acid), N-isopropylacrylamide polymers, or polyphosphazine. Example of polyamines include: polyethylenimine, polylysine (PLL), spermine, spermidine, polyamine, pseudopeptide-polyamine, peptidomimetic polyamine, dendrimer polyamine, arginine, amidine, protamine, cationic lipid, cationic porphyrin, quaternary salt of a polyamine, or an α helical peptide.

[0541] Ligands can also include targeting groups, e.g., a cell or tissue targeting agent, e.g., a lectin, glycoprotein, lipid or protein, e.g., an antibody, that binds to a specified cell type such as a glial cell. A targeting group can be a thyrotropin, melanotropin, lectin, glycoprotein, surfactant protein A, Mucin carbohydrate, multivalent lactose, multivalent galactose, N-acetyl-galactosamine, N-acetyl-glucosamine multivalent mannose, multivalent fucose, glycosylated polyaminoacids, multivalent galactose, transferrin, bisphosphonate, polyglutamate, polyaspartate, a lipid, cholesterol, a steroid, bile acid, folate, vitamin B12, biotin, or an RGD peptide or RGD peptide mimetic. In certain embodiments, the ligand is a multivalent galactose, e.g., an N-acetyl-galactosamine.

[0542] Other examples of ligands include dyes, intercalating agents (e.g. acridines), cross-linkers (e.g. psoralene, mitomycin C), porphyrins (TPPC4, texaphyrin, Sapphyrin), polycyclic aromatic hydrocarbons (e.g., phenazine, dihydrophenazine), artificial endonucleases (e.g. EDTA), lipophilic molecules, e.g., cholesterol, cholic acid, adamantane acetic acid, 1-pyrene butyric acid, dihydrotestosterone, 1,3-Bis-O(hexadecyl)glycerol, geranyloxyhexyl group, hexadecylglycerol, borneol, menthol, 1,3-propanediol, heptadecyl group, palmitic acid, myristic acid,O3-(oleoyl)lithocholic acid, O3-(oleoyl)cholenic acid, dimethoxytrityl, or phenoxazine) and peptide conjugates (e.g., antennapedia peptide, Tat peptide), alkylating agents, phosphate, amino, mercapto, PEG (e.g., PEG-40K), MPEG, [MPEG]₂, polyamino, alkyl, substituted alkyl, radiolabeled markers, enzymes, haptens (e.g. biotin), transport/absorption facilitators (e.g., aspirin, vitamin E, folic acid), synthetic ribonucleases (e.g., imidazole, bisimidazole, histamine, imidazole clusters, acridine-imidazole conjugates, Eu3+ complexes of tetraazamacrocycles), dinitrophenyl, HRP, or AP.

[0543] Ligands can be proteins, e.g., glycoproteins, or peptides, e.g., molecules having a specific affinity for a co-ligand, or antibodies e.g., an antibody, that binds to a specified cell type such as a brain cell or a glial cell. Ligands may also include hormones and hormone receptors. They can also include non-peptidic species, such as lipids, lectins, carbohydrates, vitamins, cofactors, multivalent lactose, multivalent galactose, N-acetyl-galactosamine, N-acetyl-glucosamine multivalent mannose, or multivalent fucose. The ligand can be, for example, a lipopolysaccharide, an activator of p38 MAP kinase, or an activator of NF-κB.

[0544] The ligand can be a substance, e.g., a drug, which can increase the uptake of the iRNA agent into the cell, for example, by disrupting the cell's cytoskeleton, e.g., by disrupting the cell's microtubules, microfilaments, or intermediate filaments. The drug can be, for example, taxon, vincristine, vinblastine, cytochalasin, nocodazole, japlakinolide, latrunculin A, phalloidin, swinholide A, indanocine, or myoservin.

[0545] In some embodiments, a ligand attached to an iRNA as described herein acts as a pharmacokinetic modulator (PK modulator). PK modulators include lipophiles, bile acids, steroids, phospholipid analogues, peptides, protein binding agents, PEG, vitamins etc. Exemplary PK modulators include, but are not limited to, cholesterol, fatty acids, cholic acid, lithocholic acid, dialkylglycerides, diacylglyceride, phospholipids, sphingolipids, naproxen, ibuprofen, vitamin E, biotin etc. Oligonucleotides that comprise a number of phosphorothioate linkages are also known to bind to serum protein, thus short oligonucleotides, e.g., oligonucleotides of about 5 bases, 10 bases, 15 bases or 20 bases, comprising multiple of phosphorothioate linkages in the backbone are also amenable to the present invention as ligands (e.g. as PK modulating ligands). In addition, aptamers that bind serum components (e.g. serum proteins) are also suitable for use as PK modulating ligands in the embodiments described herein.

[0546] Ligand-conjugated iRNAs of the invention may be synthesized by the use of an oligonucleotide that bears a pendant reactive functionality, such as that derived from the attachment of a linking molecule onto the oligonucleotide (described below). This reactive oligonucleotide may be reacted directly with commercially-available ligands, ligands that are synthesized bearing any of a variety of protecting groups, or ligands that have a linking moiety attached thereto.

[0547] The oligonucleotides used in the conjugates of the present invention may be conveniently and routinely made through the well-known technique of solid-phase synthesis. Equipment for such synthesis is sold by several vendors including, for example, Applied Biosystems® (Foster City, Calif.). Any other means for such synthesis known in the art may additionally or alternatively be employed. It is also known to use similar techniques to prepare other oligonucleotides, such as the phosphorothioates and alkylated derivatives.

[0548] In the ligand-conjugated oligonucleotides and ligand-molecule bearing sequence-specific linked nucleosides of the present invention, the oligonucleotides and oligonucleosides may be assembled on a suitable DNA synthesizer utilizing standard nucleotide or nucleoside precursors, or nucleotide or nucleoside conjugate precursors that already bear the linking moiety, ligand-nucleotide or nucleoside-conjugate precursors that already bear the ligand molecule, or non-nucleoside ligand-bearing building blocks.

[0549] When using nucleotide-conjugate precursors that already bear a linking moiety, the synthesis of the sequence-specific linked nucleosides is typically completed, and the ligand molecule is then reacted with the linking moiety to form the ligand-conjugated oligonucleotide. In some embodiments, the oligonucleotides or linked nucleosides of the present invention are synthesized by an automated synthesizer using phosphoramidites derived from ligand-nucleoside conjugates in addition to the standard phosphoramidites and non-standard phosphoramidites that are commercially available and routinely used in oligonucleotide synthesis.

[0550] A. Lipid Conjugates

[0551] In certain embodiments, the ligand or conjugate is a lipid or lipid-based molecule. Such a lipid or lipid-based molecule can typically bind a serum protein, such as human serum albumin (HSA). An HSA binding ligand allows for distribution of the conjugate to a target tissue, e.g., a non-kidney target tissue of the body. For example, the target tissue can be the liver, including parenchymal cells of the liver. Other molecules that can bind HSA can also be used as ligands. For example, naproxen or aspirin can be used. A lipid or lipid-based ligand can (a) increase resistance to degradation of the conjugate, (b) increase targeting or transport into a target cell or cell membrane, or (c) can be used to adjust binding to a serum protein, e.g., HSA.

[0552] A lipid-based ligand can be used to modulate, e.g., control (e.g., inhibit) the binding of the conjugate to a target tissue. For example, a lipid or lipid-based ligand that binds to HSA more strongly will be less likely to be targeted to the kidney and therefore less likely to be cleared from the body. A lipid or lipid-based ligand that binds to HSA less strongly can be used to target the conjugate to the kidney.

[0553] In certain embodiments, the lipid-based ligand binds HSA. For example, the ligand can bind HSA with a sufficient affinity such that distribution of the conjugate to a non-kidney tissue is enhanced. However, the affinity is typically not so strong that the HSA-ligand binding cannot be reversed.

[0554] In certain embodiments, the lipid-based ligand binds HSA weakly or not at all, such that distribution of the conjugate to the kidney is enhanced. Other moieties that target to kidney cells can also be used in place of or in addition to the lipid-based ligand.

[0555] In certain embodiments, the lipid-based ligand binds HSA weakly or not at all, such that distribution of the conjugate to the kidney is enhanced. Other moieties that target to kidney cells can also be used in place of or in addition to the lipid-based ligand.

[0556] In another aspect, the ligand is a moiety, e.g., a vitamin, which is taken up by a target cell, e.g., a proliferating cell. These are particularly useful for treating disorders characterized by unwanted cell proliferation, e.g., of the malignant or non-malignant type, e.g., cancer cells.

[0557] Exemplary vitamins include vitamin A, E, and K. Other exemplary vitamins include are B vitamin, e.g., folic acid, B12, riboflavin, biotin, pyridoxal or other vitamins or nutrients taken up by cancer cells. Also included are HSA and low density lipoprotein (LDL).

[0558] B. Cell Permeation Agents

[0559] In another aspect, the ligand is a cell-permeation agent, such as a helical cell-permeation agent. In certain embodiments, the agent is amphipathic. An exemplary agent is a peptide such as tat or antennopedia. If the agent is a peptide, it can be modified, including a peptidylmimetic, invertomers, non-peptide or pseudo-peptide linkages, and use of D-amino acids. The helical agent is typically an α-helical agent and can have a lipophilic and a lipophobic phase.

[0560] The ligand can be a peptide or peptidomimetic. A peptidomimetic (also referred to herein as an oligopeptidomimetic) is a molecule capable of folding into a defined three-dimensional structure similar to a natural peptide. The attachment of peptide and peptidomimetics to iRNA agents can affect pharmacokinetic distribution of the iRNA, such as by enhancing cellular recognition and absorption. The peptide or peptidomimetic moiety can be about 5-50 amino acids long, e.g., about 5, 10, 15, 20, 25, 30, 35, 40, 45, or 50 amino acids long.

[0561] A peptide or peptidomimetic can be, for example, a cell permeation peptide, cationic peptide, amphipathic peptide, or hydrophobic peptide (e.g., consisting primarily of Tyr, Trp, or Phe). The peptide moiety can be a dendrimer peptide, constrained peptide or crosslinked peptide. In another alternative, the peptide moiety can include a hydrophobic membrane translocation sequence (MTS). An exemplary hydrophobic MTS-containing peptide is RFGF having the amino acid sequence AAVALLPAVLLALLAP (SEQ ID NO:11). An RFGF analogue (e.g., amino acid sequence AALLPVLLAAP (SEQ ID NO:12)) containing a hydrophobic MTS can also be a targeting moiety. The peptide moiety can be a “delivery” peptide, which can carry large polar molecules including peptides, oligonucleotides, and protein across cell membranes. For example, sequences from the HIV Tat protein (GRKKRRQRRRPPQ (SEQ ID NO:13)) and the Drosophila Antennapedia protein (RQIKIWFQNRRMKWKK (SEQ ID NO:14)) have been found to be capable of functioning as delivery peptides. A peptide or peptidomimetic can be encoded by a random sequence of DNA, such as a peptide identified from a phage-display library, or one-bead-one-compound (OBOC) combinatorial library (Lam et al., Nature, 354:82-84, 1991). Typically, the peptide or peptidomimetic tethered to a dsRNA agent via an incorporated monomer unit is a cell targeting peptide such as an arginine-glycine-aspartic acid (RGD)-peptide, or RGD mimic. A peptide moiety can range in length from about 5 amino acids to about 40 amino acids. The peptide moieties can have a structural modification, such as to increase stability or direct conformational properties. Any of the structural modifications described below can be utilized.

[0562] An RGD peptide for use in the compositions and methods of the invention may be linear or cyclic, and may be modified, e.g., glycosylated or methylated, to facilitate targeting to a specific tissue(s). RGD-containing peptides and peptidiomimemtics may include D-amino acids, as well as synthetic RGD mimics. In addition to RGD, one can use other moieties that target the integrin ligand. Preferred conjugates of this ligand target PECAM-1 or VEGF.

[0563] An RGD peptide moiety can be used to target a particular cell type, e.g., a tumor cell, such as an endothelial tumor cell or a breast cancer tumor cell (Zitzmann et al., Cancer Res., 62:5139-43, 2002). An RGD peptide can facilitate targeting of an dsRNA agent to tumors of a variety of other tissues, including the lung, kidney, spleen, or liver (Aoki et al., Cancer Gene Therapy 8:783-787, 2001). Typically, the RGD peptide will facilitate targeting of an iRNA agent to the kidney. The RGD peptide can be linear or cyclic, and can be modified, e.g., glycosylated or methylated to facilitate targeting to specific tissues. For example, a glycosylated RGD peptide can deliver an iRNA agent to a tumor cell expressing αvβ₃ (Haubner et al., Jour. Nucl. Med., 42:326-336, 2001).

[0564] A “cell permeation peptide” is capable of permeating a cell, e.g., a microbial cell, such as a bacterial or fungal cell, or a mammalian cell, such as a human cell. A microbial cell-permeating peptide can be, for example, an α-helical linear peptide (e.g., LL-37 or Ceropin P1), a disulfide bond-containing peptide (e.g., α-defensin, β-defensin or bactenecin), or a peptide containing only one or two dominating amino acids (e.g., PR-39 or indolicidin). A cell permeation peptide can also include a nuclear localization signal (NLS). For example, a cell permeation peptide can be a bipartite amphipathic peptide, such as MPG, which is derived from the fusion peptide domain of HIV-1 gp41 and the NLS of SV40 large T antigen (Simeoni et al., Nucl. Acids Res. 31:2717-2724, 2003).

[0565] C. Carbohydrate Conjugates

[0566] In some embodiments of the compositions and methods of the invention, an iRNA further comprises a carbohydrate. The carbohydrate conjugated iRNA are advantageous for the in vivo delivery of nucleic acids, as well as compositions suitable for in vivo therapeutic use, as described herein. As used herein, “carbohydrate” refers to a compound which is either a carbohydrate per se made up of one or more monosaccharide units having at least 6 carbon atoms (which can be linear, branched or cyclic) with an oxygen, nitrogen or sulfur atom bonded to each carbon atom; or a compound having as a part thereof a carbohydrate moiety made up of one or more monosaccharide units each having at least six carbon atoms (which can be linear, branched or cyclic), with an oxygen, nitrogen or sulfur atom bonded to each carbon atom. Representative carbohydrates include the sugars (mono-, di-, tri- and oligosaccharides containing from about 4, 5, 6, 7, 8, or 9 monosaccharide units), and polysaccharides such as starches, glycogen, cellulose and polysaccharide gums. Specific monosaccharides include C5 and above (e.g., C5, C6, C7, or C8) sugars; di- and tri-saccharides include sugars having two or three monosaccharide units (e.g., C5, C6, C7, or C8).

[0567] In certain embodiments, a carbohydrate conjugate comprises a monosaccharide.

[0568] In certain embodiments, the monosaccharide is an N-acetylgalactosamine (GalNAc). GalNAc conjugates, which comprise one or more N-acetylgalactosamine (GalNAc) derivatives, are described, for example, in U.S. Pat. No. 8,106,022, the entire content of which is hereby incorporated herein by reference. In some embodiments, the GalNAc conjugate serves as a ligand that targets the iRNA to particular cells. In some embodiments, the GalNAc conjugate targets the iRNA to liver cells, e.g., by serving as a ligand for the asialoglycoprotein receptor of liver cells (e.g., hepatocytes).

[0569] In some embodiments, the carbohydrate conjugate comprises one or more GalNAc derivatives. The GalNAc derivatives may be attached via a linker, e.g., a bivalent or trivalent branched linker. In some embodiments the GalNAc conjugate is conjugated to the 3′ end of the sense strand. In some embodiments, the GalNAc conjugate is conjugated to the iRNA agent (e.g., to the 3′ end of the sense strand) via a linker, e.g., a linker as described herein. In some embodiments the GalNAc conjugate is conjugated to the 5′ end of the sense strand. In some embodiments, the GalNAc conjugate is conjugated to the iRNA agent (e.g., to the 5′ end of the sense strand) via a linker, e.g., a linker as described herein.

[0570] In certain embodiments of the invention, the GalNAc or GalNAc derivative is attached to an iRNA agent of the invention via a monovalent linker. In some embodiments, the GalNAc or GalNAc derivative is attached to an iRNA agent of the invention via a bivalent linker. In yet other embodiments of the invention, the GalNAc or GalNAc derivative is attached to an iRNA agent of the invention via a trivalent linker. In other embodiments of the invention, the GalNAc or GalNAc derivative is attached to an iRNA agent of the invention via a tetravalent linker.

[0571] In certain embodiments, the double stranded RNAi agents of the invention comprise one GalNAc or GalNAc derivative attached to the iRNA agent. In certain embodiments, the double stranded RNAi agents of the invention comprise a plurality (e.g., 2, 3, 4, 5, or 6) GalNAc or GalNAc derivatives, each independently attached to a plurality of nucleotides of the double stranded RNAi agent through a plurality of monovalent linkers.

[0572] In some embodiments, for example, when the two strands of an iRNA agent of the invention are part of one larger molecule connected by an uninterrupted chain of nucleotides between the 3′-end of one strand and the 5′-end of the respective other strand forming a hairpin loop comprising, a plurality of unpaired nucleotides, each unpaired nucleotide within the hairpin loop may independently comprise a GalNAc or GalNAc derivative attached via a monovalent linker. The hairpin loop may also be formed by an extended overhang in one strand of the duplex.

[0573] In some embodiments, for example, when the two strands of an iRNA agent of the invention are part of one larger molecule connected by an uninterrupted chain of nucleotides between the 3′-end of one strand and the 5′-end of the respective other strand forming a hairpin loop comprising, a plurality of unpaired nucleotides, each unpaired nucleotide within the hairpin loop may independently comprise a GalNAc or GalNAc derivative attached via a monovalent linker. The hairpin loop may also be formed by an extended overhang in one strand of the duplex.

[0574] In some embodiments, the GalNAc conjugate is

[chemical structure]

[0575] In some embodiments, the RNAi agent is attached to the carbohydrate conjugate via a linker as shown in the following schematic, wherein X is O or S

[chemical structure]

[0576] In some embodiments, the RNAi agent is conjugated to L96 as defined in Table 1 and shown below:

[chemical structure]

[0577] In certain embodiments, a carbohydrate conjugate for use in the compositions and methods of the invention is selected from the group consisting of:

[chemical structure]

[chemical structure]

[chemical structure]

[chemical structure]

[chemical structure]

[chemical structure]

[chemical structure]

[0578] In certain embodiments, a carbohydrate conjugate for use in the compositions and methods of the invention is a monosaccharide. In certain embodiments, the monosaccharide is an N-acetylgalactosamine, such as

[chemical structure]

[0579] Another representative carbohydrate conjugate for use in the embodiments described herein includes, but is not limited to,

[chemical structure]

[0580] when one of X or Y is an oligonucleotide, the other is a hydrogen.

[0581] In some embodiments, a suitable ligand is a ligand disclosed in WO 2019/055633, the entire contents of which are incorporated herein by reference. In one embodiment the ligand comprises the structure below:

[chemical structure]

[0582] In certain embodiments, the RNAi agents of the disclosure may include GalNAc ligands, even if such GalNAc ligands are currently projected to be of limited value for the preferred intrathecal/CNS delivery route(s) of the instant disclosure.

[0583] In certain embodiments of the invention, the GalNAc or GalNAc derivative is attached to an iRNA agent of the invention via a monovalent linker. In some embodiments, the GalNAc or GalNAc derivative is attached to an iRNA agent of the invention via a bivalent linker. In yet other embodiments of the invention, the GalNAc or GalNAc derivative is attached to an iRNA agent of the invention via a trivalent linker. In other embodiments of the invention, the GalNAc or GalNAc derivative is attached to an iRNA agent of the invention via a tetravalent linker.

[0584] In certain embodiments, the double stranded RNAi agents of the invention comprise one GalNAc or GalNAc derivative attached to the iRNA agent, e.g., the 5′end of the sense strand of a dsRNA agent, or the 5′ end of one or both sense strands of a dual targeting RNAi agent as described herein. In certain embodiments, the double stranded RNAi agents of the invention comprise a plurality (e.g., 2, 3, 4, 5, or 6) GalNAc or GalNAc derivatives, each independently attached to a plurality of nucleotides of the double stranded RNAi agent through a plurality of monovalent linkers.

[0585] In some embodiments, for example, when the two strands of an iRNA agent of the invention are part of one larger molecule connected by an uninterrupted chain of nucleotides between the 3′-end of one strand and the 5′-end of the respective other strand forming a hairpin loop comprising, a plurality of unpaired nucleotides, each unpaired nucleotide within the hairpin loop may independently comprise a GalNAc or GalNAc derivative attached via a monovalent linker.

[0586] In some embodiments, the carbohydrate conjugate further comprises one or more additional ligands as described above, such as, but not limited to, a PK modulator or a cell permeation peptide.

[0587] Additional carbohydrate conjugates and linkers suitable for use in the present invention include those described in WO 2014/179620 and WO 2014/179627, the entire contents of each of which are incorporated herein by reference.

[0588] D. Linkers

[0589] In some embodiments, the conjugate or ligand described herein can be attached to an iRNA oligonucleotide with various linkers that can be cleavable or non-cleavable.

[0590] The term “linker” or “linking group” means an organic moiety that connects two parts of a compound, e.g., covalently attaches two parts of a compound. Linkers typically comprise a direct bond or an atom such as oxygen or sulfur, a unit such as NR8, C(O), C(O)NH, SO, SO₂, SO₂NH or a chain of atoms, such as, but not limited to, substituted or unsubstituted alkyl, substituted or unsubstituted alkenyl, substituted or unsubstituted alkynyl, arylalkyl, arylalkenyl, arylalkynyl, heteroarylalkyl, heteroarylalkenyl, heteroarylalkynyl, heterocyclylalkyl, heterocyclylalkenyl, heterocyclylalkynyl, aryl, heteroaryl, heterocyclyl, cycloalkyl, cycloalkenyl, alkylarylalkyl, alkylarylalkenyl, alkylarylalkynyl, alkenylarylalkyl, alkenylarylalkenyl, alkenylarylalkynyl, alkynylarylalkyl, alkynylarylalkenyl, alkynylarylalkynyl, alkylheteroarylalkyl, alkylheteroarylalkenyl, alkylheteroarylalkynyl, alkenylheteroarylalkyl, alkenylheteroarylalkenyl, alkenylheteroarylalkynyl, alkynylheteroarylalkyl, alkynylheteroarylalkenyl, alkynylheteroarylalkynyl, alkylheterocyclylalkyl, alkylheterocyclylalkenyl, alkylhererocyclylalkynyl, alkenylheterocyclylalkyl, alkenylheterocyclylalkenyl, alkenylheterocyclylalkynyl, alkynylheterocyclylalkyl, alkynylheterocyclylalkenyl, alkynylheterocyclylalkynyl, alkylaryl, alkenylaryl, alkynylaryl, alkylheteroaryl, alkenylheteroaryl, alkynylhereroaryl, which one or more methylenes can be interrupted or terminated by O, S, S(O), SO₂, N(R8), C(O), substituted or unsubstituted aryl, substituted or unsubstituted heteroaryl, substituted or unsubstituted heterocyclic; where R8 is hydrogen, acyl, aliphatic or substituted aliphatic. In certain embodiments, the linker is between about 1-24 atoms, 2-24, 3-24, 4-24, 5-24, 6-24, 6-18, 7-18, 8-18 atoms, 7-17, 8-17, 6-16, 7-16, or 8-16 atoms.

[0591] A cleavable linking group is one which is sufficiently stable outside the cell, but which upon entry into a target cell is cleaved to release the two parts the linker is holding together. In a preferred embodiment, the cleavable linking group is cleaved at least about 10 times, 20, times, 30 times, 40 times, 50 times, 60 times, 70 times, 80 times, 90 times or more, or at least about 100 times faster in a target cell or under a first reference condition (which can, e.g., be selected to mimic or represent intracellular conditions) than in the blood of a subject, or under a second reference condition (which can, e.g., be selected to mimic or represent conditions found in the blood or serum).

[0592] Cleavable linking groups are susceptible to cleavage agents, e.g., pH, redox potential or the presence of degradative molecules. Generally, cleavage agents are more prevalent or found at higher levels or activities inside cells than in serum or blood. Examples of such degradative agents include: redox agents which are selected for particular substrates or which have no substrate specificity, including, e.g., oxidative or reductive enzymes or reductive agents such as mercaptans, present in cells, that can degrade a redox cleavable linking group by reduction; esterases; endosomes or agents that can create an acidic environment, e.g., those that result in a pH of five or lower; enzymes that can hydrolyze or degrade an acid cleavable linking group by acting as a general acid, peptidases (which can be substrate specific), and phosphatases.

[0593] A cleavable linkage group, such as a disulfide bond can be susceptible to pH. The pH of human serum is 7.4, while the average intracellular pH is slightly lower, ranging from about 7.1-7.3. Endosomes have a more acidic pH, in the range of 5.5-6.0, and lysosomes have an even more acidic pH at around 5.0. Some linkers will have a cleavable linking group that is cleaved at a preferred pH, thereby releasing a cationic lipid from the ligand inside the cell, or into the desired compartment of the cell.

[0594] A linker can include a cleavable linking group that is cleavable by a particular enzyme. The type of cleavable linking group incorporated into a linker can depend on the cell to be targeted. For example, a liver-targeting ligand can be linked to a cationic lipid through a linker that includes an ester group. Liver cells are rich in esterases, and therefore the linker will be cleaved more efficiently in liver cells than in cell types that are not esterase-rich. Other cell-types rich in esterases include cells of the lung, renal cortex, and testis.

[0595] Linkers that contain peptide bonds can be used when targeting cell types rich in peptidases, such as liver cells and synoviocytes.

[0596] In general, the suitability of a candidate cleavable linking group can be evaluated by testing the ability of a degradative agent (or condition) to cleave the candidate linking group. It will also be desirable to also test the candidate cleavable linking group for the ability to resist cleavage in the blood or when in contact with other non-target tissue. Thus, one can determine the relative susceptibility to cleavage between a first and a second condition, where the first is selected to be indicative of cleavage in a target cell and the second is selected to be indicative of cleavage in other tissues or biological fluids, e.g., blood or serum. The evaluations can be carried out in cell free systems, in cells, in cell culture, in organ or tissue culture, or in whole animals. It can be useful to make initial evaluations in cell-free or culture conditions and to confirm by further evaluations in whole animals. In preferred embodiments, useful candidate compounds are cleaved at least about 2, 4, 10, 20, 30, 40, 50, 60, 70, 80, 90, or about 100 times faster in the cell (or under in vitro conditions selected to mimic intracellular conditions) as compared to blood or serum (or under in vitro conditions selected to mimic extracellular conditions).

[0597] i. Redox Cleavable Linking Groups

[0598] In certain embodiments, a cleavable linking group is a redox cleavable linking group that is cleaved upon reduction or oxidation. An example of reductively cleavable linking group is a disulphide linking group (—S—S—). To determine if a candidate cleavable linking group is a suitable “reductively cleavable linking group,” or for example is suitable for use with a particular iRNA moiety and particular targeting agent one can look to methods described herein. For example, a candidate can be evaluated by incubation with dithiothreitol (DTT), or other reducing agent using reagents know in the art, which mimic the rate of cleavage which would be observed in a cell, e.g., a target cell. The candidates can also be evaluated under conditions which are selected to mimic blood or serum conditions. In one, candidate compounds are cleaved by at most about 10% in the blood. In other embodiments, useful candidate compounds are degraded at least about 2, 4, 10, 20, 30, 40, 50, 60, 70, 80, 90, or about 100 times faster in the cell (or under in vitro conditions selected to mimic intracellular conditions) as compared to blood (or under in vitro conditions selected to mimic extracellular conditions). The rate of cleavage of candidate compounds can be determined using standard enzyme kinetics assays under conditions chosen to mimic intracellular media and compared to conditions chosen to mimic extracellular media.

[0599] ii. Phosphate-Based Cleavable Linking Groups

[0600] In certain embodiments, a cleavable linker comprises a phosphate-based cleavable linking group. A phosphate-based cleavable linking group is cleaved by agents that degrade or hydrolyze the phosphate group. An example of an agent that cleaves phosphate groups in cells are enzymes such as phosphatases in cells. Examples of phosphate-based linking groups are —O—P(O)(ORk)-O—, —O—P(S)(ORk)-O—, —O—P(S)(SRk)-O—, —S—P(O)(ORk)-O—, —O—P(O)(ORk)-S—, —S—P(O)(ORk)-S—, —O—P(S)(ORk)-S—, —S—P(S)(ORk)-O—, —O—P(O)(Rk)-O—, —O—P(S)(Rk)-O—, —S—P(O)(Rk)-O—, —S—P(S)(Rk)-O—, —S—P(O)(Rk)-S—, —O—P(S)(Rk)-S. Exemplary embodiments are —O—P(O)(OH)—O—, —O—P(S)(OH)—O—, —O—P(S)(SH)—O—, —S—P(O)(OH)—O—, —O—P(O)(OH)—S—, —S—P(O)(OH)—S—, —O—P(S)(OH)—S—, —S—P(S)(OH)—O—, —O—P(O)(H)—O—, —O—P(S)(H)—O—, —S—P(O)(H)—O, —S—P(S)(H)—O—, —S—P(O)(H)—S—, —O—P(S)(H)—S—, wherein Rk at each occurrence can be, independently, C1-C20 alkyl, C1-C20 haloalkyl, C6-C10 aryl, or C7-C12 aralkyl. In certain preferred embodiments a phosphate-based linking group is —O—P(O)(OH)—O—. These candidates can be evaluated using methods analogous to those described above.

[0601] iii. Acid Cleavable Linking Groups

[0602] In certain embodiments, a cleavable linker comprises an acid cleavable linking group. An acid cleavable linking group is a linking group that is cleaved under acidic conditions. In preferred embodiments acid cleavable linking groups are cleaved in an acidic environment with a pH of about 6.5 or lower (e.g., about 6.0, 5.75, 5.5, 5.25, 5.0, or lower), or by agents such as enzymes that can act as a general acid. In a cell, specific low pH organelles, such as endosomes and lysosomes can provide a cleaving environment for acid cleavable linking groups. Examples of acid cleavable linking groups include but are not limited to hydrazones, esters, and esters of amino acids. Acid cleavable groups can have the general formula —C═NN—, C(O)O, or —OC(O). A preferred embodiment is when the carbon attached to the oxygen of the ester (the alkoxy group) is an aryl group, substituted alkyl group, or tertiary alkyl group such as dimethyl pentyl or t-butyl. These candidates can be evaluated using methods analogous to those described above.

[0603] iv. Ester-Based Cleavable Linking Groups

[0604] In certain embodiments, a cleavable linker comprises an ester-based cleavable linking group. An ester-based cleavable linking group is cleaved by enzymes such as esterases and amidases in cells. Examples of ester-based cleavable linking groups include but are not limited to esters of alkylene, alkenylene and alkynylene groups. Ester cleavable linking groups have the general formula —C(O)O—, or —OC(O)—. These candidates can be evaluated using methods analogous to those described above.

[0605] v. Peptide-Based Cleavable Linking Groups

[0606] In yet another embodiment, a cleavable linker comprises a peptide-based cleavable linking group. A peptide-based cleavable linking group is cleaved by enzymes such as peptidases and proteases in cells. Peptide-based cleavable linking groups are peptide bonds formed between amino acids to yield oligopeptides (e.g., dipeptides, tripeptides etc.) and polypeptides. Peptide-based cleavable groups do not include the amide group (—C(O)NH—). The amide group can be formed between any alkylene, alkenylene or alkynelene. A peptide bond is a special type of amide bond formed between amino acids to yield peptides and proteins. The peptide based cleavage group is generally limited to the peptide bond (i.e., the amide bond) formed between amino acids yielding peptides and proteins and does not include the entire amide functional group. Peptide-based cleavable linking groups have the general formula—NHCHRAC(O)NHCHRBC(O)—, where RA and RB are the R groups of the two adjacent amino acids. These candidates can be evaluated using methods analogous to those described above.

[0607] In some embodiments, an iRNA of the invention is conjugated to a carbohydrate through a linker. Non-limiting examples of iRNA carbohydrate conjugates with linkers of the compositions and methods of the invention include, but are not limited to,

[chemical structure]

[chemical structure]

[chemical structure]

when one of X or Y is an oligonucleotide, the other is a hydrogen.

[0608] In certain embodiments of the compositions and methods of the invention, a ligand is one or more “GalNAc” (N-acetylgalactosamine) derivatives attached through a bivalent or trivalent branched linker.

[0609] In certain embodiments, a dsRNA of the invention is conjugated to a bivalent or trivalent branched linker selected from the group of structures shown in any of formula (XLV)-(XLVI):

[chemical structure]

[0610] wherein:

[0611] q2A, q2B, q3A, q3B, q4A, q4B, q5A, q5B and q5C represent independently for each occurrence 0-20 and wherein the repeating unit can be the same or different;

[0612] P^{2A}, P^{2B}, P^{3A}, P^{3B}, P^{4A}, P^{4B}, P^{5A}, P^{5B}, P^{5C}, T^{2A}, T^{2B}, T^{3A}, T^{3B}, T^{4A}, T^{4B}, T^{4A}, T^{5B}, T^{5C}, are each independently for each occurrence absent, CO, NH, O, S, OC(O), NHC(O), CH₂, CH₂NH or CH₂O;

[0613] Q^{2A}, Q^{2B}, Q^{3A}, Q^{3B}, Q^{4A}, Q^{4B}, Q^{5A}, Q^{5B}, Q^{5C}, are independently for each occurrence absent, alkylene, substituted alkylene wherein one or more methylenes can be interrupted or terminated by one or more of O, S, S(O), SO₂, N(R^{N}), C(R′)═C(R″), C≡C or C(O);

[0614] R^{2A}, R^{2B}, R^{3A}, R^{3B}, R^{4A}, R^{4B}, R^{5A}, R^{5B}, R^{5C} are each independently for each occurrence absent, NH, O, S, CH₂, C(O)O, C(O)NH, NHCH(R^{a})C(O), —C(O)—CH(R^{a})—NH—, CO, CH═N—O,

[chemical structure]

or heterocyclyl;

[0615] L^{2A}, L^{2B}, L^{3A}, L^{3B}, L^{4A}, L^{4B}, L^{5A}, L^{5B} and L^{5C} represent the ligand; i.e. each independently for each occurrence a monosaccharide (such as GalNAc), disaccharide, trisaccharide, tetrasaccharide, oligosaccharide, or polysaccharide; and R^{a} is H or amino acid side chain. Trivalent conjugating GalNAc derivatives are particularly useful for use with RNAi agents for inhibiting the expression of a target gene, such as those of formula (XLIX):

[chemical structure]

[0616] wherein L^{5A} L^{5B} and L^{5C} represent a monosaccharide, such as GalNAc derivative.

[0617] Examples of suitable bivalent and trivalent branched linker groups conjugating GalNAc derivatives include, but are not limited to, the structures recited above as formulas II, VII, XI, X, and XIII.

[0618] Representative U.S. patents that teach the preparation of RNA conjugates include, but are not limited to, U.S. Pat. Nos. 4,828,979; 4,948,882; 5,218,105; 5,525,465; 5,541,313; 5,545,730; 5,552,538; 5,578,717, 5,580,731; 5,591,584; 5,109,124; 5,118,802; 5,138,045; 5,414,077; 5,486,603; 5,512,439; 5,578,718; 5,608,046; 4,587,044; 4,605,735; 4,667,025; 4,762,779; 4,789,737; 4,824,941; 4,835,263; 4,876,335; 4,904,582; 4,958,013; 5,082,830; 5,112,963; 5,214,136; 5,082,830; 5,112,963; 5,214,136; 5,245,022; 5,254,469; 5,258,506; 5,262,536; 5,272,250; 5,292,873; 5,317,098; 5,371,241, 5,391,723; 5,416,203, 5,451,463; 5,510,475; 5,512,667; 5,514,785; 5,565,552; 5,567,810; 5,574,142; 5,585,481; 5,587,371; 5,595,726; 5,597,696; 5,599,923; 5,599,928; 5,688,941; 6,294,664; 6,320,017; 6,576,752; 6,783,931; 6,900,297; 7,037,646; and 8,106,022, the entire contents of each of which are hereby incorporated herein by reference.

[0619] It is not necessary for all positions in a given compound to be uniformly modified, and in fact more than one of the aforementioned modifications can be incorporated in a single compound or even at a single nucleoside within an iRNA. The present invention also includes iRNA compounds that are chimeric compounds.

[0620] “Chimeric” iRNA compounds or “chimeras,” in the context of this invention, are iRNA compounds, preferably dsRNA agents, that contain two or more chemically distinct regions, each made up of at least one monomer unit, i.e., a nucleotide in the case of a dsRNA compound. These iRNAs typically contain at least one region wherein the RNA is modified so as to confer upon the iRNA increased resistance to nuclease degradation, increased cellular uptake, or increased binding affinity for the target nucleic acid. An additional region of the iRNA can serve as a substrate for enzymes capable of cleaving RNA:DNA or RNA:RNA hybrids. By way of example, RNase H is a cellular endonuclease which cleaves the RNA strand of an RNA:DNA duplex. Activation of RNase H, therefore, results in cleavage of the RNA target, thereby greatly enhancing the efficiency of iRNA inhibition of gene expression. Consequently, comparable results can often be obtained with shorter iRNAs when chimeric dsRNAs are used, compared to phosphorothioate deoxy dsRNAs hybridizing to the same target region. Cleavage of the RNA target can be routinely detected by gel electrophoresis and, if necessary, associated nucleic acid hybridization techniques known in the art.

[0621] In certain instances, the RNA of an iRNA can be modified by a non-ligand group. A number of non-ligand molecules have been conjugated to iRNAs in order to enhance the activity, cellular distribution or cellular uptake of the iRNA, and procedures for performing such conjugations are available in the scientific literature. Such non-ligand moieties have included lipid moieties, such as cholesterol (Kubo, T. et al., Biochem. Biophys. Res. Comm., 2007, 365(1):54-61; Letsinger et al., Proc. Natl. Acad. Sci. USA, 1989, 86:6553), cholic acid (Manoharan et al., Bioorg. Med. Chem. Lett., 1994, 4:1053), a thioether, e.g., hexyl-S-tritylthiol (Manoharan et al., Ann. N.Y. Acad. Sci., 1992, 660:306; Manoharan et al., Bioorg. Med. Chem. Let., 1993, 3:2765), a thiocholesterol (Oberhauser et al., Nucl. Acids Res., 1992, 20:533), an aliphatic chain, e.g., dodecandiol or undecyl residues (Saison-Behmoaras et al., EMBO J., 1991, 10:111; Kabanov et al., FEBS Lett., 1990, 259:327; Svinarchuk et al., Biochimie, 1993, 75:49), a phospholipid, e.g., di-hexadecyl-rac-glycerol or triethylammonium 1,2-di-O-hexadecyl-rac-glycero-3-H-phosphonate (Manoharan et al., Tetrahedron Lett., 1995, 36:3651; Shea et al., Nucl. Acids Res., 1990, 18:3777), a polyamine or a polyethylene glycol chain (Manoharan et al., Nucleosides & Nucleotides, 1995, 14:969), or adamantane acetic acid (Manoharan et al., Tetrahedron Lett., 1995, 36:3651), a palmityl moiety (Mishra et al., Biochim. Biophys. Acta, 1995, 1264:229), or an octadecylamine or hexylamino-carbonyl-oxycholesterol moiety (Crooke et al., J. Pharmacol. Exp. Ther., 1996, 277:923). Representative United States patents that teach the preparation of such RNA conjugates have been listed above. Typical conjugation protocols involve the synthesis of RNAs bearing an aminolinker at one or more positions of the sequence. The amino group is then reacted with the molecule being conjugated using appropriate coupling or activating reagents. The conjugation reaction can be performed either with the RNA still bound to the solid support or following cleavage of the RNA, in solution phase. Purification of the RNA conjugate by HPLC typically affords the pure conjugate.

### V. In Vivo Testing of APOE Knockdown

[0622] Human APOE knock-in mouse models, including transgenic mice expressing one or more human APOE isoforms (APOE2, APOE3, and APOE4) have been generated (see, e.g., Trommer, et al. (2005) Neuroreport 15:2655-2658) and can be used to demonstrate the in vivo efficacy of the RNAi agents provided herein.

[0623] Mouse models of APOE-associated neurodegenerative disease (e.g., Alzheimer's disease) have also been generated and can further be used to demonstrate the in vivo efficacy of the RNAi agents provided herein. Such models may combine transgenic expression of one or more isoforms of human APOE with constitutive or inducible expression, e.g., overexpression, of, for example, human amyloid precursor protein (APP), in some instances comprising a pathogenic mutation (e.g., a Swedish mutation (KM670/671NL)), constitutive or inducible expression, e.g., overexpression, of, human presenilin 1 (PS1), in some instances comprising a pathogenic mutation (e.g., L166P) mutation (see, e.g., Huynh, et al. (2017) Neuron 96: 1013-1023), and/or constitutive or inducible expression, e.g., overexpression, of 1N4R human tau protein, in some instances comprising a pathogenic mutation (e.g., a P301S mutation) (Shi, et al. (2017) Nature 549: 523-527).

### VI. Delivery of an RNAi Agent of the Disclosure

[0624] The delivery of a RNAi agent of the disclosure to a cell e.g., a cell within a subject, such as a human subject (e.g., a subject in need thereof, such as a subject having an APOE-associated neurodegenerative disorder, e.g., an amyloid-β-mediated disease, such as, Alzheimer's's disease, Down's syndrome, and cerebral amyloid angiopathy, or a tau-mediated disease, e.g. a primary tauopathy, such as Frontotemporal dementia (FTD), Progressive supranuclear palsy (PSP), Cordicobasal degeneration (CBD), Pick's disease (PiD), Globular glial tauopathies (GGTs), frontotemporal dementia with parkinsonism (FTDP, FTDP-17), Chronic traumatic encelopathy (CTE), Dementia pugilistica, Frontotemporal lobar degeneration (FTLD), Argyrophilic grain disease (AGD), and Primary age-related tauopathy (PART), or a secondary tauopathy, e.g., AD, Creuzfeld Jakob's disease, Down's Syndrome, and Familial British Dementia can be achieved in a number of different ways. For example, delivery may be performed by contacting a cell with an RNAi agent of the disclosure either in vitro or in vivo. In vivo delivery may also be performed directly by administering a composition comprising an RNAi agent, e.g., a dsRNA, to a subject. Alternatively, in vivo delivery may be performed indirectly by administering one or more vectors that encode and direct the expression of the RNAi agent. These alternatives are discussed further below.

[0625] In general, any method of delivering a nucleic acid molecule (in vitro or in vivo) can be adapted for use with a RNAi agent of the disclosure (see e.g., Akhtar S. and Julian R L., (1992) Trends Cell. Biol. 2(5):139-144 and WO94/02595, which are incorporated herein by reference in their entireties). For in vivo delivery, factors to consider in order to deliver an RNAi agent include, for example, biological stability of the delivered agent, prevention of non-specific effects, and accumulation of the delivered agent in the target tissue. The non-specific effects of an RNAi agent can be minimized by local administration, for example, by direct injection or implantation into a tissue or topically administering the preparation. Local administration to a treatment site maximizes local concentration of the agent, limits the exposure of the agent to systemic tissues that can otherwise be harmed by the agent or that can degrade the agent, and permits a lower total dose of the RNAi agent to be administered. Several studies have shown successful knockdown of gene products when an RNAi agent is administered locally. For example, intraocular delivery of a VEGF dsRNA by intravitreal injection in cynomolgus monkeys (Tolentino, M J. et al., (2004) Retina 24:132-138) and subretinal injections in mice (Reich, S J. et al. (2003) Mol. Vis. 9:210-216) were both shown to prevent neovascularization in an experimental model of age-related macular degeneration. In addition, direct intratumoral injection of a dsRNA in mice reduces tumor volume (Pille, J. et al. (2005) Mol. Ther. 11:267-274) and can prolong survival of tumor-bearing mice (Kim, W J. et al., (2006) Mol. Ther. 14:343-350; Li, S. et al., (2007) Mol. Ther. 15:515-523). RNA interference has also shown success with local delivery to the CNS by direct injection (Dorn, G. et al., (2004) Nucleic Acids 32:e49; Tan, P H. et al. (2005) Gene Ther. 12:59-66; Makimura, H. et a.l (2002) BMC Neurosci. 3:18; Shishkina, G T., et al. (2004) Neuroscience 129:521-528; Thakker, E R., et al. (2004) Proc. Nat. Acad. Sci. U.S.A. 101:17270-17275; Akaneya, Y., et al. (2005) J. Neurophysiol. 93:594-602) and to the lungs by intranasal administration (Howard, K A. et al., (2006) Mol. Ther. 14:476-484; Zhang, X. et al., (2004) J. Biol. Chem. 279:10677-10684; Bitko, V. et al., (2005) Nat. Med. 11:50-55). For administering a RNAi agent systemically for the treatment of a disease, the RNA can be modified or alternatively delivered using a drug delivery system; both methods act to prevent the rapid degradation of the dsRNA by endo- and exo-nucleases in vivo. Modification of the RNA or the pharmaceutical carrier can also permit targeting of the RNAi agent to the target tissue and avoid undesirable off-target effects (e.g., without wishing to be bound by theory, use of GNAs as described herein has been identified to destabilize the seed region of a dsRNA, resulting in enhanced preference of such dsRNAs for on-target effectiveness, relative to off-target effects, as such off-target effects are significantly weakened by such seed region destabilization). RNAi agents can be modified by chemical conjugation to lipophilic groups such as cholesterol to enhance cellular uptake and prevent degradation. For example, a RNAi agent directed against ApoB conjugated to a lipophilic cholesterol moiety was injected systemically into mice and resulted in knockdown of apoB mRNA in both the liver and jejunum (Soutschek, J. et al., (2004) Nature 432:173-178). Conjugation of an RNAi agent to an aptamer has been shown to inhibit tumor growth and mediate tumor regression in a mouse model of prostate cancer (McNamara, J O. et al., (2006) Nat. Biotechnol. 24:1005-1015). In an alternative embodiment, the RNAi agent can be delivered using drug delivery systems such as a nanoparticle, a dendrimer, a polymer, liposomes, or a cationic delivery system. Positively charged cationic delivery systems facilitate binding of molecule RNAi agent (negatively charged) and also enhance interactions at the negatively charged cell membrane to permit efficient uptake of an RNAi agent by the cell. Cationic lipids, dendrimers, or polymers can either be bound to an RNAi agent, or induced to form a vesicle or micelle (see e.g., Kim S H. et al., (2008) Journal of Controlled Release 129(2):107-116) that encases an RNAi agent. The formation of vesicles or micelles further prevents degradation of the RNAi agent when administered systemically. Methods for making and administering cationic-RNAi agent complexes are well within the abilities of one skilled in the art (see e.g., Sorensen, D R., et al. (2003) J. Mol. Biol 327:761-766; Verma, U N. et al., (2003) Clin. Cancer Res. 9:1291-1300; Arnold, A S et al. (2007) J. Hypertens. 25:197-205, which are incorporated herein by reference in their entirety). Some non-limiting examples of drug delivery systems useful for systemic delivery of RNAi agents include DOTAP (Sorensen, D R., et al (2003), supra; Verma, U N. et al., (2003), supra), Oligofectamine, “solid nucleic acid lipid particles” (Zimmermann, T S. et al., (2006) Nature 441:111-114), cardiolipin (Chien, P Y. et al., (2005) Cancer Gene Ther. 12:321-328; Pal, A. et al., (2005) Int J. Oncol. 26:1087-1091), polyethyleneimine (Bonnet M E. et al., (2008) Pharm. Res. August 16 Epub ahead of print; Aigner, A. (2006) J. Biomed. Biotechnol. 71659), Arg-Gly-Asp (RGD) peptides (Liu, S. (2006) Mol. Pharm. 3:472-487), and polyamidoamines (Tomalia, D A. et al., (2007) Biochem. Soc. Trans. 35:61-67; Yoo, H. et al., (1999) Pharm. Res. 16:1799-1804). In some embodiments, a RNAi agent forms a complex with cyclodextrin for systemic administration. Methods for administration and pharmaceutical compositions of RNAi agents and cyclodextrins can be found in U.S. Pat. No. 7,427,605, which is herein incorporated by reference in its entirety.

[0626] Certain aspects of the instant disclosure relate to a method of reducing the expression of an APOE target gene in a cell, comprising contacting said cell with the double-stranded RNAi agent of the disclosure. In one embodiment, the cell is a hepatic cell, optionally a hepatocyte. In one embodiment, the cell is an extrahepatic cell, optionally a CNS cell.

[0627] Another aspect of the disclosure relates to a method of reducing the expression of an APOE target gene in a subject, comprising administering to the subject the double-stranded RNAi agent of the disclosure.

[0628] Another aspect of the disclosure relates to a method of treating a subject having an APOE-associated neurodegenerative disorder, comprising administering to the subject a therapeutically effective amount of the double-stranded RNAi agent of the disclosure, thereby treating the subject. Exemplary CNS disorders that can be treated by the method of the disclosure include amyloid-β-mediated diseases, such as, Alzheimer's's disease, Down's syndrome, and cerebral amyloid angiopathy, and tau-mediated diseases, e.g. primary tauopathies, such as Frontotemporal dementia (FTD), Progressive supranuclear palsy (PSP), Cordicobasal degeneration (CBD), Pick's disease (PiD), Globular glial tauopathies (GGTs), frontotemporal dementia with parkinsonism (FTDP, FTDP-17), Chronic traumatic encelopathy (CTE), Dementia pugilistica, Frontotemporal lobar degeneration (FTLD), Argyrophilic grain disease (AGD), and Primary age-related tauopathy (PART), and secondary tauopathies, e.g., AD, Creuzfeld Jakob's disease, Down's Syndrome, and Familial British Dementia. In one embodiment, the double-stranded RNAi agent is administered subcutaneously.

[0629] In one embodiment, the double-stranded RNAi agent is administered intrathecally. By intrathecal administration of the double-stranded RNAi agent, the method can reduce the expression of an APOE target gene in a brain (e.g., striatum) or spine tissue, for instance, cortex, cerebellum, cervical spine, lumbar spine, and thoracic spine.

[0630] For ease of exposition the formulations, compositions and methods in this section are discussed largely with regard to modified siRNA compounds. It may be understood, however, that these formulations, compositions and methods can be practiced with other siRNA compounds, e.g., unmodified siRNA compounds, and such practice is within the disclosure. A composition that includes a RNAi agent can be delivered to a subject by a variety of routes. Exemplary routes include: intrathecal, intravenous, topical, rectal, anal, vaginal, nasal, pulmonary, and ocular.

[0631] The RNAi agents of the disclosure can be incorporated into pharmaceutical compositions suitable for administration. Such compositions typically include one or more species of RNAi agent and a pharmaceutically acceptable carrier. As used herein the language “pharmaceutically acceptable carrier” is intended to include any and all solvents, dispersion media, coatings, antibacterial and antifungal agents, isotonic and absorption delaying agents, and the like, compatible with pharmaceutical administration. The use of such media and agents for pharmaceutically active substances is well known in the art. Except insofar as any conventional media or agent is incompatible with the active compound, use thereof in the compositions is contemplated. Supplementary active compounds can also be incorporated into the compositions.

[0632] The pharmaceutical compositions of the present disclosure may be administered in a number of ways depending upon whether local or systemic treatment is desired and upon the area to be treated. Administration may be topical (including ophthalmic, vaginal, rectal, intranasal, transdermal), oral, or parenteral. Parenteral administration includes intravenous drip, subcutaneous, intraperitoneal or intramuscular injection, or intrathecal or intraventricular administration.

[0633] The route and site of administration may be chosen to enhance targeting. For example, to target muscle cells, intramuscular injection into the muscles of interest would be a logical choice. Lung cells might be targeted by administering the RNAi agent in aerosol form. The vascular endothelial cells could be targeted by coating a balloon catheter with the RNAi agent and mechanically introducing the RNA.

[0634] Formulations for topical administration may include transdermal patches, ointments, lotions, creams, gels, drops, suppositories, sprays, liquids, and powders. Conventional pharmaceutical carriers, aqueous, powder or oily bases, thickeners and the like may be necessary or desirable. Coated condoms, gloves and the like may also be useful.

[0635] Compositions for oral administration include powders or granules, suspensions or solutions in water, syrups, elixirs or non-aqueous media, tablets, capsules, lozenges, or troches. In the case of tablets, carriers that can be used include lactose, sodium citrate and salts of phosphoric acid. Various disintegrants such as starch, and lubricating agents such as magnesium stearate, sodium lauryl sulfate and talc, are commonly used in tablets. For oral administration in capsule form, useful diluents are lactose and high molecular weight polyethylene glycols. When aqueous suspensions are required for oral use, the nucleic acid compositions can be combined with emulsifying and suspending agents. If desired, certain sweetening or flavoring agents can be added.

[0636] Compositions for intrathecal or intraventricular administration may include sterile aqueous solutions which may also contain buffers, diluents, and other suitable additives.

[0637] Formulations for parenteral administration may include sterile aqueous solutions which may also contain buffers, diluents, and other suitable additives. Intraventricular injection may be facilitated by an intraventricular catheter, for example, attached to a reservoir. For intravenous use, the total concentration of solutes may be controlled to render the preparation isotonic.

[0638] In one embodiment, the administration of the siRNA compound, e.g., a double-stranded siRNA compound, or ssiRNA compound, composition is parenteral, e.g., intravenous (e.g., as a bolus or as a diffusible infusion), intradermal, intraperitoneal, intramuscular, intrathecal, intraventricular, intracranial, subcutaneous, transmucosal, buccal, sublingual, endoscopic, rectal, oral, vaginal, topical, pulmonary, intranasal, urethral, or ocular. Administration can be provided by the subject or by another person, e.g., a health care provider. The medication can be provided in measured doses or in a dispenser which delivers a metered dose. Selected modes of delivery are discussed in more detail below.

[0639] Intrathecal Administration.

[0640] In one embodiment, the double-stranded RNAi agent is delivered by intrathecal injection (i.e., injection into the spinal fluid which bathes the brain and spinal cord tissue). Intrathecal injection of RNAi agents into the spinal fluid can be performed as a bolus injection or via minipumps which can be implanted beneath the skin, providing a regular and constant delivery of siRNA into the spinal fluid. The circulation of the spinal fluid from the choroid plexus, where it is produced, down around the spinal chord and dorsal root ganglia and subsequently up past the cerebellum and over the cortex to the arachnoid granulations, where the fluid can exit the CNS, that, depending upon size, stability, and solubility of the compounds injected, molecules delivered intrathecally could hit targets throughout the entire CNS.

[0641] In some embodiments, the intrathecal administration is via a pump. The pump may be a surgically implanted osmotic pump. In one embodiment, the osmotic pump is implanted into the subarachnoid space of the spinal canal to facilitate intrathecal administration.

[0642] In some embodiments, the intrathecal administration is via an intrathecal delivery system for a pharmaceutical including a reservoir containing a volume of the pharmaceutical agent, and a pump configured to deliver a portion of the pharmaceutical agent contained in the reservoir. More details about this intrathecal delivery system may be found in WO 2015/116658, which is incorporated by reference in its entirety.

[0643] The amount of intrathecally injected RNAi agents may vary from one target gene to another target gene and the appropriate amount that has to be applied may have to be determined individually for each target gene. Typically, this amount ranges from 10 μg to 2 mg, preferably 50 μg to 1500 μg, more preferably 100 μg to 1000 μg.

[0644] Vector Encoded RNAi Agents of the Disclosure

[0645] RNAi agents targeting the APOE gene can be expressed from transcription units inserted into DNA or RNA vectors (see, e.g., Couture, A, et al., TIG. (1996), 12:5-10; WO 00/22113, WO 00/22114, and U.S. Pat. No. 6,054,299). Expression is preferablysustained (months or longer), depending upon the specific construct used and the target tissue or cell type. These transgenes can be introduced as a linear construct, a circular plasmid, or a viral vector, which can be an integrating or non-integrating vector. The transgene can also be constructed to permit it to be inherited as an extrachromosomal plasmid (Gassmann, et al., (1995) Proc. Natl. Acad. Sci. USA 92:1292).

[0646] The individual strand or strands of a RNAi agent can be transcribed from a promoter on an expression vector. Where two separate strands are to be expressed to generate, for example, a dsRNA, two separate expression vectors can be co-introduced (e.g., by transfection or infection) into a target cell. Alternatively, each individual strand of a dsRNA can be transcribed by promoters both of which are located on the same expression plasmid. In one embodiment, a dsRNA is expressed as inverted repeat polynucleotides joined by a linker polynucleotide sequence such that the dsRNA has a stem and loop structure.

[0647] RNAi agent expression vectors are generally DNA plasmids or viral vectors. Expression vectors compatible with eukaryotic cells, preferably those compatible with vertebrate cells, can be used to produce recombinant constructs for the expression of a RNAi agent as described herein. Delivery of RNAi agent expressing vectors can be systemic, such as by intravenous or intramuscular administration, by administration to target cells ex-planted from the patient followed by reintroduction into the patient, or by any other means that allows for introduction into a desired target cell.

[0648] Viral vector systems which can be utilized with the methods and compositions described herein include, but are not limited to, (a) adenovirus vectors; (b) retrovirus vectors, including but not limited to lentiviral vectors, moloney murine leukemia virus, etc.; (c) adeno-associated virus vectors; (d) herpes simplex virus vectors; (e) SV 40 vectors; (f) polyoma virus vectors; (g) papilloma virus vectors; (h) picornavirus vectors; (i) pox virus vectors such as an orthopox, e.g., vaccinia virus vectors or avipox, e.g. canary pox or fowl pox; and (j) a helper-dependent or gutless adenovirus. Replication-defective viruses can also be advantageous. Different vectors will or will not become incorporated into the cells' genome. The constructs can include viral sequences for transfection, if desired. Alternatively, the construct can be incorporated into vectors capable of episomal replication, e.g. EPV and EBV vectors. Constructs for the recombinant expression of a RNAi agent will generally require regulatory elements, e.g., promoters, enhancers, etc., to ensure the expression of the RNAi agent in target cells. Other aspects to consider for vectors and constructs are known in the art.

### VII. Pharmaceutical Compositions of the Invention

[0649] The present disclosure also includes pharmaceutical compositions and formulations which include the RNAi agents of the disclosure. In one embodiment, provided herein are pharmaceutical compositions containing an RNAi agent, as described herein, and a pharmaceutically acceptable carrier. The pharmaceutical compositions containing the RNAi agent are useful for treating a disease or disorder associated with the expression or activity of APOE, e.g., an APOE-associated neurodegenerative disease, such as an amyloid-β-mediated disease, e.g. Alzheimer's disease, Down's syndrome, and cerebral amyloid angiopathy, a tau-mediated disease, e.g. a primary tauopathy, such as Frontotemporal dementia (FTD), Progressive supranuclear palsy (PSP), Cordicobasal degeneration (CBD), Pick's disease (PiD), Globular glial tauopathies (GGTs), frontotemporal dementia with parkinsonism (FTDP, FTDP-17), Chronic traumatic encelopathy (CTE), Dementia pugilistica, Frontotemporal lobar degeneration (FTLD), Argyrophilic grain disease (AGD), and Primary age-related tauopathy (PART), or a secondary tauopathy, e.g., AD, Creuzfeld Jakob's disease, Down's Syndrome, and Familial British Dementia.

[0650] Such pharmaceutical compositions are formulated based on the mode of delivery. One example is compositions that are formulated for systemic administration via parenteral delivery, e.g., by intravenous (IV), intramuscular (IM), or for subcutaneous (subQ) delivery. Another example is compositions that are formulated for direct delivery into the CNS, e.g., by intrathecal or intravitreal routes of injection, optionally by infusion into the brain (e.g., striatum), such as by continuous pump infusion.

[0651] In some embodiments, the pharmaceutical compositions of the invention are pyrogen free or non-pyrogenic.

[0652] The pharmaceutical compositions of the disclosure may be administered in dosages sufficient to inhibit expression of an APOE gene. In general, a suitable dose of an RNAi agent of the disclosure will be in the range of about 0.001 to about 200.0 milligrams per kilogram body weight of the recipient per day, generally in the range of about 1 to 50 mg per kilogram body weight per day.

[0653] A repeat-dose regimen may include administration of a therapeutic amount of a RNAi agent on a regular basis, such as monthly to once every six months. In certain embodiments, the RNAi agent is administered about once per quarter (i.e., about once every three months) to about twice per year.

[0654] After an initial treatment regimen (e.g., loading dose), the treatments can be administered on a less frequent basis.

[0655] In other embodiments, a single dose of the pharmaceutical compositions can be long lasting, such that subsequent doses are administered at not more than 1, 2, 3, or 4 or more month intervals. In some embodiments of the disclosure, a single dose of the pharmaceutical compositions of the disclosure is administered once per month. In other embodiments of the disclosure, a single dose of the pharmaceutical compositions of the disclosure is administered once per quarter to twice per year.

[0656] The skilled artisan will appreciate that certain factors can influence the dosage and timing required to effectively treat a subject, including but not limited to the severity of the disease or disorder, previous treatments, the general health or age of the subject, and other diseases present. Moreover, treatment of a subject with a therapeutically effective amount of a composition can include a single treatment or a series of treatments.

[0657] Advances in mouse genetics have generated a number of mouse models for the study of various APOE-associated neurodegenerative diseases that would benefit from reduction in the expression of APOE. Such models can be used for in vivo testing of RNAi agents, as well as for determining a therapeutically effective dose. Suitable mouse models are known in the art and include, for example, the mouse models described elsewhere herein.

[0658] The pharmaceutical compositions of the present disclosure can be administered in a number of ways depending upon whether local or systemic treatment is desired and upon the area to be treated. Administration can be topical (e.g., by a transdermal patch), pulmonary, e.g., by inhalation or insufflation of powders or aerosols, including by nebulizer; intratracheal, intranasal, epidermal and transdermal, oral or parenteral. Parenteral administration includes intravenous, intraarterial, subcutaneous, intraperitoneal or intramuscular injection or infusion; subdermal, e.g., via an implanted device; or intracranial, e.g., by intraparenchymal, intrathecal or intraventricular, administration.

[0659] The RNAi agents can be delivered in a manner to target a particular tissue, such as the liver, the CNS (e.g., neuronal, glial or vascular tissue of the brain), or both the liver and CNS.

[0660] Pharmaceutical compositions and formulations for topical administration can include transdermal patches, ointments, lotions, creams, gels, drops, suppositories, sprays, liquids and powders. Conventional pharmaceutical carriers, aqueous, powder or oily bases, thickeners and the like can be necessary or desirable. Coated condoms, gloves and the like can also be useful. Suitable topical formulations include those in which the RNAi agents featured in the disclosure are in admixture with a topical delivery agent such as lipids, liposomes, fatty acids, fatty acid esters, steroids, chelating agents and surfactants. Suitable lipids and liposomes include neutral (e.g., dioleoylphosphatidyl DOPE ethanolamine, dimyristoylphosphatidyl choline DMPC, distearolyphosphatidyl choline) negative (e.g., dimyristoylphosphatidyl glycerol DMPG) and cationic (e.g., dioleoyltetramethylaminopropyl DOTAP and dioleoylphosphatidyl ethanolamine DOTMA). RNAi agents featured in the disclosure can be encapsulated within liposomes or can form complexes thereto, in particular to cationic liposomes. Alternatively, RNAi agents can be complexed to lipids, in particular to cationic lipids. Suitable fatty acids and esters include but are not limited to arachidonic acid, oleic acid, eicosanoic acid, lauric acid, caprylic acid, capric acid, myristic acid, palmitic acid, stearic acid, linoleic acid, linolenic acid, dicaprate, tricaprate, monoolein, dilaurin, glyceryl 1-monocaprate, 1-dodecylazacycloheptan-2-one, an acylcarnitine, an acylcholine, or a C₁₋₂₀ alkyl ester (e.g., isopropylmyristate IPM), monoglyceride, diglyceride or pharmaceutically acceptable salt thereof. Topical formulations are described in detail in U.S. Pat. No. 6,747,014, which is incorporated herein by reference.

[0661] A. RNAi Agent Formulations Comprising Membranous Molecular Assemblies

[0662] A RNAi agent for use in the compositions and methods of the disclosure can be formulated for delivery in a membranous molecular assembly, e.g., a liposome or a micelle. As used herein, the term “liposome” refers to a vesicle composed of amphiphilic lipids arranged in at least one bilayer, e.g., one bilayer or a plurality of bilayers. Liposomes include unilamellar and multilamellar vesicles that have a membrane formed from a lipophilic material and an aqueous interior. The aqueous portion contains the RNAi agent composition. The lipophilic material isolates the aqueous interior from an aqueous exterior, which typically does not include the RNAi agent composition, although in some examples, it may. Liposomes are useful for the transfer and delivery of active ingredients to the site of action. Because the liposomal membrane is structurally similar to biological membranes, when liposomes are applied to a tissue, the liposomal bilayer fuses with bilayer of the cellular membranes. As the merging of the liposome and cell progresses, the internal aqueous contents that include the RNAi agent are delivered into the cell where the RNAi agent can specifically bind to a target RNA and can mediate RNAi. In some cases the liposomes are also specifically targeted, e.g., to direct the RNAi agent to particular cell types.

[0663] A liposome containing an RNAi agent can be prepared by a variety of methods. In one example, the lipid component of a liposome is dissolved in a detergent so that micelles are formed with the lipid component. For example, the lipid component can be an amphipathic cationic lipid or lipid conjugate. The detergent can have a high critical micelle concentration and may be nonionic. Exemplary detergents include cholate, CHAPS, octylglucoside, deoxycholate, and lauroyl sarcosine. The RNAi agent preparation is then added to the micelles that include the lipid component. The cationic groups on the lipid interact with the RNAi agent and condense around the RNAi agent to form a liposome. After condensation, the detergent is removed, e.g., by dialysis, to yield a liposomal preparation of RNAi agent.

[0664] If necessary a carrier compound that assists in condensation can be added during the condensation reaction, e.g., by controlled addition. For example, the carrier compound can be a polymer other than a nucleic acid (e.g., spermine or spermidine). pH can also adjusted to favor condensation.

[0665] Methods for producing stable polynucleotide delivery vehicles, which incorporate a polynucleotide/cationic lipid complex as structural components of the delivery vehicle, are further described in, e.g., WO 96/37194, the entire contents of which are incorporated herein by reference. Liposome formation can also include one or more aspects of exemplary methods described in Felgner, P. L. et al., (1987) Proc. Natl. Acad. Sci. USA 8:7413-7417; U.S. Pat. Nos. 4,897,355; 5,171,678; Bangham et al., (1965) M. Mol. Biol. 23:238; Olson et al., (1979) Biochim. Biophys. Acta 557:9; Szoka et al., (1978) Proc. Natl. Acad. Sci. 75: 4194; Mayhew et al., (1984) Biochim. Biophys. Acta 775:169; Kim et al., (1983) Biochim. Biophys. Acta 728:339; and Fukunaga et al., (1984) Endocrinol. 115:757. Commonly used techniques for preparing lipid aggregates of appropriate size for use as delivery vehicles include sonication and freeze-thaw plus extrusion (see, e.g., Mayer et al., (1986) Biochim. Biophys. Acta 858:161. Microfluidization can be used when consistently small (50 to 200 nm) and relatively uniform aggregates are desired (Mayhew et al., (1984) Biochim. Biophys. Acta 775:169. These methods are readily adapted to packaging RNAi agent preparations into liposomes.

[0666] Liposomes fall into two broad classes. Cationic liposomes are positively charged liposomes which interact with the negatively charged nucleic acid molecules to form a stable complex. The positively charged nucleic acid/liposome complex binds to the negatively charged cell surface and is internalized in an endosome. Due to the acidic pH within the endosome, the liposomes are ruptured, releasing their contents into the cell cytoplasm (Wang et al. (1987) Biochem. Biophys. Res. Commun., 147:980-985).

[0667] Liposomes, which are pH-sensitive or negatively charged, entrap nucleic acids rather than complex with them. Since both the nucleic acid and the lipid are similarly charged, repulsion rather than complex formation occurs. Nevertheless, some nucleic acid is entrapped within the aqueous interior of these liposomes. pH sensitive liposomes have been used to deliver nucleic acids encoding the thymidine kinase gene to cell monolayers in culture. Expression of the exogenous gene was detected in the target cells (Zhou et al. (1992) Journal of Controlled Release, 19:269-274).

[0668] One major type of liposomal composition includes phospholipids other than naturally-derived phosphatidylcholine. Neutral liposome compositions, for example, can be formed from dimyristoyl phosphatidylcholine (DMPC) or dipalmitoyl phosphatidylcholine (DPPC). Anionic liposome compositions generally are formed from dimyristoyl phosphatidylglycerol, while anionic fusogenic liposomes are formed primarily from dioleoyl phosphatidylethanolamine (DOPE). Another type of liposomal composition is formed from phosphatidylcholine (PC) such as, for example, soybean PC, and egg PC. Another type is formed from mixtures of phospholipid or phosphatidylcholine or cholesterol.

[0669] Examples of other methods to introduce liposomes into cells in vitro and in vivo include U.S. Pat. Nos. 5,283,185; 5,171,678; WO 94/00569; WO 93/24640; WO 91/16024; Felgner, (1994) J. Biol. Chem. 269:2550; Nabel, (1993) Proc. Natl. Acad. Sci. 90:11307; Nabel, (1992) Human Gene Ther. 3:649; Gershon, (1993) Biochem. 32:7143; and Strauss, (1992) EMBO J. 11:417.

[0670] Non-ionic liposomal systems have also been examined to determine their utility in the delivery of drugs to the skin, in particular systems comprising non-ionic surfactant and cholesterol. Non-ionic liposomal formulations comprising Novasome™ I (glyceryl dilaurate/cholesterol/polyoxyethylene-10-stearyl ether) and Novasome™ II (glyceryl distearate/cholesterol/polyoxyethylene-10-stearyl ether) were used to deliver cyclosporin-A into the dermis of mouse skin. Results indicated that such non-ionic liposomal systems were effective in facilitating the deposition of cyclosporine A into different layers of the skin (Hu et al., (1994) S.T.P. Pharma. Sci., 4(6):466).

[0671] Liposomes also include “sterically stabilized” liposomes, a term which, as used herein, refers to liposomes comprising one or more specialized lipids that, when incorporated into liposomes, result in enhanced circulation lifetimes relative to liposomes lacking such specialized lipids. Examples of sterically stabilized liposomes are those in which part of the vesicle-forming lipid portion of the liposome (A) comprises one or more glycolipids, such as monosialoganglioside G_{M1}, or (B) is derivatized with one or more hydrophilic polymers, such as a polyethylene glycol (PEG) moiety. While not wishing to be bound by any particular theory, it is thought in the art that, at least for sterically stabilized liposomes containing gangliosides, sphingomyelin, or PEG-derivatized lipids, the enhanced circulation half-life of these sterically stabilized liposomes derives from a reduced uptake into cells of the reticuloendothelial system (RES) (Allen et al., (1987) FEBS Letters, 223:42; Wu et al., (1993) Cancer Research, 53:3765).

[0672] Various liposomes comprising one or more glycolipids are known in the art. Papahadjopoulos et al. (Ann. N.Y. Acad. Sci., (1987), 507:64) reported the ability of monosialoganglioside G_{M1}, galactocerebroside sulfate and phosphatidylinositol to improve blood half-lives of liposomes. These findings were expounded upon by Gabizon et al. (Proc. Natl. Acad. Sci. U.S.A., (1988), 85,:6949). U.S. Pat. No. 4,837,028 and WO 88/04924, both to Allen et al., disclose liposomes comprising (1) sphingomyelin and (2) the ganglioside G_{M1} or a galactocerebroside sulfate ester. U.S. Pat. No. 5,543,152 (Webb et al.) discloses liposomes comprising sphingomyelin. Liposomes comprising 1,2-sn-dimyristoylphosphatidylcholine are disclosed in WO 97/13499 (Lim et al).

[0673] In one embodiment, cationic liposomes are used. Cationic liposomes possess the advantage of being able to fuse to the cell membrane. Non-cationic liposomes, although not able to fuse as efficiently with the plasma membrane, are taken up by macrophages in vivo and can be used to deliver RNAi agents to macrophages.

[0674] Further advantages of liposomes include: liposomes obtained from natural phospholipids are biocompatible and biodegradable; liposomes can incorporate a wide range of water and lipid soluble drugs; liposomes can protect encapsulated RNAi agents in their internal compartments from metabolism and degradation (Rosoff, in “Pharmaceutical Dosage Forms,” Lieberman, Rieger and Banker (Eds.), 1988, volume 1, p. 245). Important considerations in the preparation of liposome formulations are the lipid surface charge, vesicle size and the aqueous volume of the liposomes.

[0675] A positively charged synthetic cationic lipid, N-[1-(2,3-dioleyloxy)propyl]-N,N,N-trimethylammonium chloride (DOTMA) can be used to form small liposomes that interact spontaneously with nucleic acid to form lipid-nucleic acid complexes which are capable of fusing with the negatively charged lipids of the cell membranes of tissue culture cells, resulting in delivery of RNAi agent (see, e.g., Felgner, P. L. et al., (1987) Proc. Natl. Acad. Sci. USA 8:7413-7417, and U.S. Pat. No. 4,897,355 for a description of DOTMA and its use with DNA).

[0676] A DOTMA analogue, 1,2-bis(oleoyloxy)-3-(trimethylammonia)propane (DOTAP) can be used in combination with a phospholipid to form DNA-complexing vesicles. LipofectinT^{M} Bethesda Research Laboratories, Gaithersburg, Md.) is an effective agent for the delivery of highly anionic nucleic acids into living tissue culture cells that comprise positively charged DOTMA liposomes which interact spontaneously with negatively charged polynucleotides to form complexes. When enough positively charged liposomes are used, the net charge on the resulting complexes is also positive. Positively charged complexes prepared in this way spontaneously attach to negatively charged cell surfaces, fuse with the plasma membrane, and efficiently deliver functional nucleic acids into, for example, tissue culture cells. Another commercially available cationic lipid, 1,2-bis(oleoyloxy)-3,3-(trimethylammonia)propane (“DOTAP”) (Boehringer Mannheim, Indianapolis, Ind.) differs from DOTMA in that the oleoyl moieties are linked by ester, rather than ether linkages.

[0677] Other reported cationic lipid compounds include those that have been conjugated to a variety of moieties including, for example, carboxyspermine which has been conjugated to one of two types of lipids and includes compounds such as 5-carboxyspermylglycine dioctaoleoylamide (“DOGS”) (Transfectam™, Promega, Madison, Wis.) and dipalmitoylphosphatidylethanolamine 5-carboxyspermyl-amide (“DPPES”) (see, e.g., U.S. Pat. No. 5,171,678).

[0678] Another cationic lipid conjugate includes derivatization of the lipid with cholesterol (“DC-Chol”) which has been formulated into liposomes in combination with DOPE (See, Gao, X. and Huang, L., (1991) Biochim. Biophys. Res. Commun. 179:280). Lipopolylysine, made by conjugating polylysine to DOPE, has been reported to be effective for transfection in the presence of serum (Zhou, X. et al., (1991) Biochim. Biophys. Acta 1065:8). For certain cell lines, these liposomes containing conjugated cationic lipids, are said to exhibit lower toxicity and provide more efficient transfection than the DOTMA-containing compositions. Other commercially available cationic lipid products include DMRIE and DMRIE-HP (Vical, La Jolla, Calif.) and Lipofectamine (DOSPA) (Life Technology, Inc., Gaithersburg, Md.). Other cationic lipids suitable for the delivery of oligonucleotides are described in WO 98/39359 and WO 96/37194.

[0679] Liposomal formulations are particularly suited for topical administration, liposomes present several advantages over other formulations. Such advantages include reduced side effects related to high systemic absorption of the administered drug, increased accumulation of the administered drug at the desired target, and the ability to administer RNAi agent into the skin. In some implementations, liposomes are used for delivering RNAi agent to epidermal cells and also to enhance the penetration of RNAi agent into dermal tissues, e.g., into skin. For example, the liposomes can be applied topically. Topical delivery of drugs formulated as liposomes to the skin has been documented (see, e.g., Weiner et al., (1992) Journal of Drug Targeting, vol. 2, 405-410 and du Plessis et al., (1992) Antiviral Research, 18:259-265; Mannino, R. J. and Fould-Fogerite, S., (1998) Biotechniques 6:682-690; Itani, T. et al., (1987) Gene 56:267-276; Nicolau, C. et al. (1987) Meth. Enzymol. 149:157-176; Straubinger, R. M. and Papahadjopoulos, D. (1983) Meth. Enzymol. 101:512-527; Wang, C. Y. and Huang, L., (1987) Proc. Natl. Acad. Sci. USA 84:7851-7855).

[0680] Non-ionic liposomal systems have also been examined to determine their utility in the delivery of drugs to the skin, in particular systems comprising non-ionic surfactant and cholesterol. Non-ionic liposomal formulations comprising Novasome I (glyceryl dilaurate/cholesterol/polyoxyethylene-10-stearyl ether) and Novasome II (glyceryl distearate/cholesterol/polyoxyethylene-10-stearyl ether) were used to deliver a drug into the dermis of mouse skin. Such formulations with RNAi agent are useful for treating a dermatological disorder.

[0681] Liposomes that include RNAi agents can be made highly deformable. Such deformability can enable the liposomes to penetrate through pore that are smaller than the average radius of the liposome. For example, transfersomes are a type of deformable liposomes. Transferosomes can be made by adding surface edge activators, usually surfactants, to a standard liposomal composition. Transfersomes that include RNAi agent can be delivered, for example, subcutaneously by infection in order to deliver RNAi agent to keratinocytes in the skin. In order to cross intact mammalian skin, lipid vesicles must pass through a series of fine pores, each with a diameter less than 50 nm, under the influence of a suitable transdermal gradient. In addition, due to the lipid properties, these transferosomes can be self-optimizing (adaptive to the shape of pores, e.g., in the skin), self-repairing, and can frequently reach their targets without fragmenting, and often self-loading.

[0682] Other formulations amenable to the present disclosure are described in U.S. provisional application Ser. No. 61/018,616, filed Jan. 2, 2008; 61/018,611, filed Jan. 2, 2008; 61/039,748, filed Mar. 26, 2008; 61/047,087, filed Apr. 22, 2008 and 61/051,528, filed May 8, 2008. PCT application number PCT/US2007/080331, filed Oct. 3, 2007, also describes formulations that are amenable to the present disclosure.

[0683] Transfersomes, yet another type of liposomes, are highly deformable lipid aggregates which are attractive candidates for drug delivery vehicles. Transfersomes can be described as lipid droplets which are so highly deformable that they are easily able to penetrate through pores which are smaller than the droplet. Transfersomes are adaptable to the environment in which they are used, e.g., they are self-optimizing (adaptive to the shape of pores in the skin), self-repairing, frequently reach their targets without fragmenting, and often self-loading. To make transfersomes it is possible to add surface edge-activators, usually surfactants, to a standard liposomal composition. Transfersomes have been used to deliver serum albumin to the skin. The transfersome-mediated delivery of serum albumin has been shown to be as effective as subcutaneous injection of a solution containing serum albumin.

[0684] Surfactants find wide application in formulations such as those described herein, particularly in emulsions (including microemulsions) and liposomes. The most common way of classifying and ranking the properties of the many different types of surfactants, both natural and synthetic, is by the use of the hydrophile/lipophile balance (HLB). The nature of the hydrophilic group (also known as the “head”) provides the most useful means for categorizing the different surfactants used in formulations (Rieger, in Pharmaceutical Dosage Forms, Marcel Dekker, Inc., New York, N.Y., 1988, p. 285).

[0685] If the surfactant molecule is not ionized, it is classified as a nonionic surfactant. Nonionic surfactants find wide application in pharmaceutical and cosmetic products and are usable over a wide range of pH values. In general, their HLB values range from 2 to about 18 depending on their structure. Nonionic surfactants include nonionic esters such as ethylene glycol esters, propylene glycol esters, glyceryl esters, polyglyceryl esters, sorbitan esters, sucrose esters, and ethoxylated esters. Nonionic alkanolamides and ethers such as fatty alcohol ethoxylates, propoxylated alcohols, and ethoxylated/propoxylated block polymers are also included in this class. The polyoxyethylene surfactants are the most popular members of the nonionic surfactant class.

[0686] If the surfactant molecule carries a negative charge when it is dissolved or dispersed in water, the surfactant is classified as anionic. Anionic surfactants include carboxylates such as soaps, acyl lactylates, acyl amides of amino acids, esters of sulfuric acid such as alkyl sulfates and ethoxylated alkyl sulfates, sulfonates such as alkyl benzene sulfonates, acyl isethionates, acyl taurates and sulfosuccinates, and phosphates. The most important members of the anionic surfactant class are the alkyl sulfates and the soaps.

[0687] If the surfactant molecule carries a positive charge when it is dissolved or dispersed in water, the surfactant is classified as cationic. Cationic surfactants include quaternary ammonium salts and ethoxylated amines. The quaternary ammonium salts are the most used members of this class.

[0688] If the surfactant molecule has the ability to carry either a positive or negative charge, the surfactant is classified as amphoteric. Amphoteric surfactants include acrylic acid derivatives, substituted alkylamides, N-alkylbetaines and phosphatides.

The use of surfactants in drug products, formulations and in emulsions has been reviewed (Rieger, in Pharmaceutical Dosage Forms, Marcel Dekker, Inc., New York, N.Y., 1988, p. 285).

[0689] The RNAi agent for use in the methods of the disclosure can also be provided as micellar formulations. “Micelles” are defined herein as a particular type of molecular assembly in which amphipathic molecules are arranged in a spherical structure such that all the hydrophobic portions of the molecules are directed inward, leaving the hydrophilic portions in contact with the surrounding aqueous phase. The converse arrangement exists if the environment is hydrophobic.

[0690] A mixed micellar formulation suitable for delivery through transdermal membranes may be prepared by mixing an aqueous solution of the siRNA composition, an alkali metal C₈ to C₂₂ alkyl sulphate, and a micelle forming compounds. Exemplary micelle forming compounds include lecithin, hyaluronic acid, pharmaceutically acceptable salts of hyaluronic acid, glycolic acid, lactic acid, chamomile extract, cucumber extract, oleic acid, linoleic acid, linolenic acid, monoolein, monooleates, monolaurates, borage oil, evening of primrose oil, menthol, trihydroxy oxo cholanyl glycine and pharmaceutically acceptable salts thereof, glycerin, polyglycerin, lysine, polylysine, triolein, polyoxyethylene ethers and analogues thereof, polidocanol alkyl ethers and analogues thereof, chenodeoxycholate, deoxycholate, and mixtures thereof. The micelle forming compounds may be added at the same time or after addition of the alkali metal alkyl sulphate. Mixed micelles will form with substantially any kind of mixing of the ingredients but vigorous mixing in order to provide smaller size micelles.

[0691] In one method a first micellar composition is prepared which contains the siRNA composition and at least the alkali metal alkyl sulphate. The first micellar composition is then mixed with at least three micelle forming compounds to form a mixed micellar composition. In another method, the micellar composition is prepared by mixing the siRNA composition, the alkali metal alkyl sulphate and at least one of the micelle forming compounds, followed by addition of the remaining micelle forming compounds, with vigorous mixing.

[0692] Phenol or m-cresol may be added to the mixed micellar composition to stabilize the formulation and protect against bacterial growth. Alternatively, phenol or m-cresol may be added with the micelle forming ingredients. An isotonic agent such as glycerin may also be added after formation of the mixed micellar composition.

[0693] For delivery of the micellar formulation as a spray, the formulation can be put into an aerosol dispenser and the dispenser is charged with a propellant. The propellant, which is under pressure, is in liquid form in the dispenser. The ratios of the ingredients are adjusted so that the aqueous and propellant phases become one, i.e., there is one phase. If there are two phases, it is necessary to shake the dispenser prior to dispensing a portion of the contents, e.g., through a metered valve. The dispensed dose of pharmaceutical agent is propelled from the metered valve in a fine spray.

[0694] Propellants may include hydrogen-containing chlorofluorocarbons, hydrogen-containing fluorocarbons, dimethyl ether and diethyl ether. In certain embodiments, HFA 134a (1,1,1,2 tetrafluoroethane) may be used.

[0695] The specific concentrations of the essential ingredients can be determined by relatively straightforward experimentation. For absorption through the oral cavities, it is often desirable to increase, e.g., at least double or triple, the dosage for through injection or administration through the gastrointestinal tract.

[0696] Lipid Particles

[0697] RNAi agents, e.g., dsRNAs of in the disclosure may be fully encapsulated in a lipid formulation, e.g., a LNP, or other nucleic acid-lipid particle.

[0698] As used herein, the term “LNP” refers to a stable nucleic acid-lipid particle. LNPs typically contain a cationic lipid, a non-cationic lipid, and a lipid that prevents aggregation of the particle (e.g., a PEG-lipid conjugate). LNPs are extremely useful for systemic applications, as they exhibit extended circulation lifetimes following intravenous (i.v.) injection and accumulate at distal sites (e.g., sites physically separated from the administration site). LNPs include “pSPLP,” which inciude an encapsulated condensing agent-nucleic acid complex as set forth in WO 00/03683. The particles of the present disclosure typically have a mean diameter of about 50 nm to about 150 nm, more typically about 60 nm to about 130 nm, more typically about 70 nm to about 110 nm, most typically about 70 nm to about 90 nm, and are substantially nontoxic. In addition, the nucleic acids when present in the nucleic acid-lipid particles of the present disclosure are resistant in aqueous solution to degradation with a nuclease. Nucleic acid-lipid particles and their method of preparation are disclosed in, e.g., U.S. Pat. Nos. 5,976,567; 5,981,501; 6,534,484; 6,586,410; 6,815,432; United States Patent publication No. 2010/0324120 and WO 96/40964.

[0699] In one embodiment, the lipid to drug ratio (mass/mass ratio) (e.g., lipid to dsRNA ratio) will be in the range of from about 1:1 to about 50:1, from about 1:1 to about 25:1, from about 3:1 to about 15:1, from about 4:1 to about 10:1, from about 5:1 to about 9:1, or about 6:1 to about 9:1. Ranges intermediate to the above recited ranges are also contemplated to be part of the disclosure.

[0700] Certain specific LNP formulations for delivery of RNAi agents have been described in the art, including, e.g., “LNP01” formulations as described in, e.g., WO 2008/042973, which is hereby incorporated by reference.

[0701] Additional exemplary lipid-dSRNA formulations are identified in the table below.

| | | cationic lipid/non-cationic |
|---|---|---|
| | | lipid/cholesterol/PEG-lipid conjugate |
| | Ionizable/Cationic Lipid | Lipid:siRNA ratio |
| SNALP-1 | 1,2-Dilinolenyloxy-N,N- | DLinDMA/DPPC/Cholesterol/PEG- |
| | dimethylaminopropane (DLinDMA) | eDMA |
| | | (57.1/7.1/34.4/1.4) |
| | | lipid:siRNA ~7:1 |
| 2-XTC | 2,2-Dilinoleyl-4-dimethylaminoethyl-[1,3]- | XTC/DPPC/Cholesterol/PEG-cDMA |
| | dioxolane (XTC) | 57.1/7.1/34.4/1.4 |
| | | lipid:siRNA ~7:1 |
| LNP05 | 2,2-Dilinoleyl-4-dimethylaminoethyl-[1,3]- | XTC/DSPC/Cholesterol/PEG-DMG |
| | dioxolane (XTC) | 57.5/7.5/31.5/3.5 |
| | | lipid:siRNA ~6:1 |
| LNP06 | 2,2-Dilinoleyl-4-dimethylaminoethyl-[1,3]- | XTC/DSPC/Cholesterol/PEG-DMG |
| | dioxolane (XTC) | 57.5/7.5/31.5/3.5 |
| | | lipid:siRNA ~11:1 |
| LNP07 | 2,2-Dilinoleyl-4-dimethylaminoethyl-[1,3]- | XTC/DSPC/Cholesterol/PEG-DMG |
| | dioxolane (XTC) | 60/7.5/31/1.5, |
| | | lipid:siRNA ~6:1 |
| LNP08 | 2,2-Dilinoleyl-4-dimethylaminoethyl-[1,3]- | XTC/DSPC/Cholesterol/PEG-DMG |
| | dioxolane (XTC) | 60/7.5/31/1.5, |
| | | lipid:siRNA ~11:1 |
| LNP09 | 2,2-Dilinoleyl-4-dimethylaminoethyl-[1,3]- | XTC/DSPC/Cholesterol/PEG-DMG |
| | dioxolane (XTC) | 50/10/38.5/1.5 |
| | | Lipid:siRNA 10:1 |
| LNP10 | (3aR,5s,6aS)-N,N-dimethyl-2,2- | ALN100/DSPC/Cholesterol/PEG- |
| | di((9Z,12Z)-octadeca-9,12- | DMG |
| | dienyl)tetrahydro-3aH- | 50/10/38.5/1.5 |
| | cyclopenta[d][1,3]dioxol-5-amine | Lipid:siRNA 10:1 |
| | (ALN100) | |
| LNP11 | (6Z,9Z,28Z,31Z)-heptatriaconta-6,9,28,31- | MC-3/DSPC/Cholesterol/PEG-DMG |
| | tetraen-19-yl 4-(dimethylamino)butanoate | 50/10/38.5/1.5 |
| | (MC3) | Lipid:siRNA 10:1 |
| LNP12 | 1,1′-(2-(4-(2-((2-(bis(2- | Tech G1/DSPC/Cholesterol/PEG- |
| | hydroxydodecyl)amino)ethyl)(2- | DMG |
| | hydroxydodecyl)amino)ethyl)piperazin-1- | 50/10/38.5/1.5 |
| | yl)ethylazanediyl)didodecan-2-ol (Tech | Lipid:siRNA 10:1 |
| | G1) | |
| LNP13 | XTC | XTC/DSPC/Chol/PEG-DMG |
| | | 50/10/38.5/1.5 |
| | | Lipid:siRNA: 33:1 |
| LNP14 | MC3 | MC3/DSPC/Chol/PEG-DMG |
| | | 40/15/40/5 |
| | | Lipid:siRNA: 11:1 |
| LNP15 | MC3 | MC3/DSPC/Chol/PEG-DSG/GalNAc- |
| | | PEG-DSG |
| | | 50/10/35/4.5/0.5 |
| | | Lipid:siRNA: 11:1 |
| LNP16 | MC3 | MC3/DSPC/Chol/PEG-DMG |
| | | 50/10/38.5/1.5 |
| | | Lipid:siRNA: 7:1 |
| LNP17 | MC3 | MC3/DSPC/Chol/PEG-DSG |
| | | 50/10/38.5/1.5 |
| | | Lipid:siRNA: 10:1 |
| LNP18 | MC3 | MC3/DSPC/Chol/PEG-DMG |
| | | 50/10/38.5/1.5 |
| | | Lipid:siRNA: 12:1 |
| LNP19 | MC3 | MC3/DSPC/Chol/PEG-DMG |
| | | 50/10/35/5 |
| | | Lipid:siRNA: 8:1 |
| LNP20 | MC3 | MC3/DSPC/Chol/PEG-DPG |
| | | 50/10/38.5/1.5 |
| | | Lipid:siRNA: 10:1 |
| LNP21 | C12-200 | C12-200/DSPC/Chol/PEG-DSG |
| | | 50/10/38.5/1.5 |
| | | Lipid:siRNA: 7:1 |
| LNP22 | XTC | XTC/DSPC/Chol/PEG-DSG |
| | | 50/10/38.5/1.5 |
| | | Lipid:siRNA: 10:1 |

DSPC: distearoylphosphatidylcholine
DPPC: dipalmitoylphosphatidylcholine
PEG-DMG: PEG-didimyristoyl glycerol (C14-PEG, or PEG-C14) (PEG with avg mol wt of 2000)
PEG-DSG: PEG-distyryl glycerol (C18-PEG, or PEG-C18) (PEG with avg mol wt of 2000)
PEG-cDMA: PEG-carbamoyl-1,2-dimyristyloxypropylamine (PEG with avg mol wt of 2000)
SNALP (1,2-Dilinolenyloxy-N,N-dimethylaminopropane (DLinDMA)) comprising formulations are described in WO 2009/127060, which is hereby incorporated by reference.
XTC comprising formulations are described in WO 2010/088537, the entire contents of which are hereby incorporated herein by reference.
MC3 comprising formulations are described, e.g., in United States Patent Publication No. 2010/0324120, the entire contents of which are hereby incorporated by reference.
ALNY-100 comprising formulations are described in WO 2010/054406, the entire contents of which are hereby incorporated herein by reference.
C12-200 comprising formulations are described in WO 2010/129709, the entire contents of which are hereby incorporated herein by reference.

[0702] Compositions and formulations for oral administration include powders or granules, microparticulates, nanoparticulates, suspensions or solutions in water or non-aqueous media, capsules, gel capsules, sachets, tablets or minitablets. Thickeners, flavoring agents, diluents, emulsifiers, dispersing aids or binders can be desirable. In some embodiments, oral formulations are those in which dsRNAs featured in the disclosure are administered in conjunction with one or more penetration enhancer surfactants and chelators. Suitable surfactants include fatty acids or esters or salts thereof, bile acids or salts thereof. Suitable bile acids/salts include chenodeoxycholic acid (CDCA) and ursodeoxychenodeoxycholic acid (UDCA), cholic acid, dehydrocholic acid, deoxycholic acid, glucholic acid, glycholic acid, glycodeoxycholic acid, taurocholic acid, taurodeoxycholic acid, sodium tauro-24,25-dihydro-fusidate and sodium glycodihydrofusidate. Suitable fatty acids include arachidonic acid, undecanoic acid, oleic acid, lauric acid, caprylic acid, capric acid, myristic acid, palmitic acid, stearic acid, linoleic acid, linolenic acid, dicaprate, tricaprate, monoolein, dilaurin, glyceryl 1-monocaprate, 1-dodecylazacycloheptan-2-one, an acylcarnitine, an acylcholine, or a monoglyceride, a diglyceride or a pharmaceutically acceptable salt thereof (e.g., sodium). In some embodiments, combinations of penetration enhancers are used, for example, fatty acids/salts in combination with bile acids/salts. One exemplary combination is the sodium salt of lauric acid, capric acid and UDCA. Further penetration enhancers include polyoxyethylene-9-lauryl ether, polyoxyethylene-20-cetyl ether. DsRNAs featured in the disclosure can be delivered orally, in granular form including sprayed dried particles, or complexed to form micro or nanoparticles. DsRNA complexing agents include poly-amino acids; polyimines; polyacrylates; polyalkylacrylates, polyoxethanes, polyalkylcyanoacrylates; cationized gelatins, albumins, starches, acrylates, polyethyleneglycols (PEG) and starches; polyalkylcyanoacrylates; DEAE-derivatized polyimines, pollulans, celluloses and starches. Suitable complexing agents include chitosan, N-trimethylchitosan, poly-L-lysine, polyhistidine, polyornithine, polyspermines, protamine, polyvinylpyridine, polythiodiethylaminomethylethylene P(TDAE), polyaminostyrene (e.g., p-amino), poly(methylcyanoacrylate), poly(ethylcyanoacrylate), poly(butylcyanoacrylate), poly(isobutylcyanoacrylate), poly(isohexylcynaoacrylate), DEAE-methacrylate, DEAE-hexylacrylate, DEAE-acrylamide, DEAE-albumin and DEAE-dextran, polymethylacrylate, polyhexylacrylate, poly(D,L-lactic acid), poly(DL-lactic-co-glycolic acid (PLGA), alginate, and polyethyleneglycol (PEG). Oral formulations for dsRNAs and their preparation are described in detail in U.S. Pat. No. 6,887,906, U.S. 2003/0027780, and U.S. Pat. No. 6,747,014, each of which is incorporated herein by reference.

[0703] Compositions and formulations for parenteral, intraparenchymal (into the brain), intrathecal, intraventricular or intrahepatic administration can include sterile aqueous solutions which can also contain buffers, diluents and other suitable additives such as, but not limited to, penetration enhancers, carrier compounds and other pharmaceutically acceptable carriers or excipients.

[0704] Pharmaceutical compositions of the present disclosure include, but are not limited to, solutions, emulsions, and liposome-containing formulations. These compositions can be generated from a variety of components that include, but are not limited to, preformed liquids, self-emulsifying solids and self-emulsifying semisolids. Particularly preferred are formulations that target the brain when treating APP-associated diseases or disorders.

[0705] The pharmaceutical formulations of the present disclosure, which can conveniently be presented in unit dosage form, can be prepared according to conventional techniques well known in the pharmaceutical industry. Such techniques include the step of bringing into association the active ingredients with the pharmaceutical carrier(s) or excipient(s). In general, the formulations are prepared by uniformly and intimately bringing into association the active ingredients with liquid carriers or finely divided solid carriers or both, and then, if necessary, shaping the product.

[0706] The compositions of the present disclosure can be formulated into any of many possible dosage forms such as, but not limited to, tablets, capsules, gel capsules, liquid syrups, soft gels, suppositories, and enemas. The compositions of the present disclosure can also be formulated as suspensions in aqueous, non-aqueous or mixed media. Aqueous suspensions can further contain substances which increase the viscosity of the suspension including, for example, sodium carboxymethylcellulose, sorbitol or dextran. The suspension can also contain stabilizers.

[0707] Additional Formulations

[0708] i. Emulsions

[0709] The compositions of the present disclosure can be prepared and formulated as emulsions. Emulsions are typically heterogeneous systems of one liquid dispersed in another in the form of droplets usually exceeding 0.1 μm in diameter (see e.g., Ansel's Pharmaceutical Dosage Forms and Drug Delivery Systems, Allen, L V., Popovich N G., and Ansel H C., 2004, Lippincott Williams & Wilkins (8th ed.), New York, N.Y.; Idson, in Pharmaceutical Dosage Forms, Lieberman, Rieger and Banker (Eds.), 1988, Marcel Dekker, Inc., New York, N.Y., volume 1, p. 199; Rosoff, in Pharmaceutical Dosage Forms, Lieberman, Rieger and Banker (Eds.), 1988, Marcel Dekker, Inc., New York, N.Y., Volume 1, p. 245; Block in Pharmaceutical Dosage Forms, Lieberman, Rieger and Banker (Eds.), 1988, Marcel Dekker, Inc., New York, N.Y., volume 2, p. 335; Higuchi et al., in Remington's Pharmaceutical Sciences, Mack Publishing Co., Easton, Pa., 1985, p. 301). Emulsions are often biphasic systems comprising two immiscible liquid phases intimately mixed and dispersed with each other. In general, emulsions can be of either the water-in-oil (w/o) or the oil-in-water (o/w) variety. When an aqueous phase is finely divided into and dispersed as minute droplets into a bulk oily phase, the resulting composition is called a water-in-oil (w/o) emulsion. Alternatively, when an oily phase is finely divided into and dispersed as minute droplets into a bulk aqueous phase, the resulting composition is called an oil-in-water (o/w) emulsion. Emulsions can contain additional components in addition to the dispersed phases, and the active drug which can be present as a solution in either aqueous phase, oily phase or itself as a separate phase. Pharmaceutical excipients such as emulsifiers, stabilizers, dyes, and anti-oxidants can also be present in emulsions as needed. Pharmaceutical emulsions can also be multiple emulsions that are comprised of more than two phases such as, for example, in the case of oil-in-water-in-oil (o/w/o) and water-in-oil-in-water (w/o/w) emulsions. Such complex formulations often provide certain advantages that simple binary emulsions do not. Multiple emulsions in which individual oil droplets of an o/w emulsion enclose small water droplets constitute a w/o/w emulsion. Likewise, a system of oil droplets enclosed in globules of water stabilized in an oily continuous phase provides an o/w/o emulsion.

[0710] Emulsions are characterized by little or no thermodynamic stability. Often, the dispersed or discontinuous phase of the emulsion is well dispersed into the external or continuous phase and maintained in this form through the means of emulsifiers or the viscosity of the formulation. Either of the phases of the emulsion can be a semisolid or a solid, as is the case of emulsion-style ointment bases and creams. Other means of stabilizing emulsions entail the use of emulsifiers that can be incorporated into either phase of the emulsion. Emulsifiers can broadly be classified into four categories: synthetic surfactants, naturally occurring emulsifiers, absorption bases, and finely dispersed solids (see e.g., Ansel's Pharmaceutical Dosage Forms and Drug Delivery Systems, Allen, L V., Popovich N G., and Ansel H C., 2004, Lippincott Williams & Wilkins (8th ed.), New York, N.Y.; Idson, in Pharmaceutical Dosage Forms, Lieberman, Rieger and Banker (Eds.), 1988, Marcel Dekker, Inc., New York, N.Y., volume 1, p. 199).

[0711] Synthetic surfactants, also known as surface active agents, have found wide applicability in the formulation of emulsions and have been reviewed in the literature (see e.g., Ansel's Pharmaceutical Dosage Forms and Drug Delivery Systems, Allen, L V., Popovich N G., and Ansel H C., 2004, Lippincott Williams & Wilkins (8th ed.), New York, N.Y.; Rieger, in Pharmaceutical Dosage Forms, Lieberman, Rieger and Banker (Eds.), 1988, Marcel Dekker, Inc., New York, N.Y., volume 1, p. 285; Idson, in Pharmaceutical Dosage Forms, Lieberman, Rieger and Banker (Eds.), Marcel Dekker, Inc., New York, N.Y., 1988, volume 1, p. 199). Surfactants are typically amphiphilic and comprise a hydrophilic and a hydrophobic portion. The ratio of the hydrophilic to the hydrophobic nature of the surfactant has been termed the hydrophile/lipophile balance (HLB) and is a valuable tool in categorizing and selecting surfactants in the preparation of formulations. Surfactants can be classified into different classes based on the nature of the hydrophilic group: nonionic, anionic, cationic and amphoteric (see e.g., Ansel's Pharmaceutical Dosage Forms and Drug Delivery Systems, Allen, L V., Popovich N G., and Ansel H C., 2004, Lippincott Williams & Wilkins (8th ed.), New York, N.Y. Rieger, in Pharmaceutical Dosage Forms, Lieberman, Rieger and Banker (Eds.), 1988, Marcel Dekker, Inc., New York, N.Y., volume 1, p. 285).

[0712] Naturally occurring emulsifiers used in emulsion formulations include lanolin, beeswax, phosphatides, lecithin and acacia. Absorption bases possess hydrophilic properties such that they can soak up water to form w/o emulsions yet retain their semisolid consistencies, such as anhydrous lanolin and hydrophilic petrolatum. Finely divided solids have also been used as good emulsifiers especially in combination with surfactants and in viscous preparations. These include polar inorganic solids, such as heavy metal hydroxides, nonswelling clays such as bentonite, attapulgite, hectorite, kaolin, montmorillonite, colloidal aluminum silicate and colloidal magnesium aluminum silicate, pigments and nonpolar solids such as carbon or glyceryl tristearate.

[0713] A large variety of non-emulsifying materials are also included in emulsion formulations and contribute to the properties of emulsions. These include fats, oils, waxes, fatty acids, fatty alcohols, fatty esters, humectants, hydrophilic colloids, preservatives and antioxidants (Block, in Pharmaceutical Dosage Forms, Lieberman, Rieger and Banker (Eds.), 1988, Marcel Dekker, Inc., New York, N.Y., volume 1, p. 335; Idson, in Pharmaceutical Dosage Forms, Lieberman, Rieger and Banker (Eds.), 1988, Marcel Dekker, Inc., New York, N.Y., volume 1, p. 199).

[0714] Hydrophilic colloids or hydrocolloids include naturally occurring gums and synthetic polymers such as polysaccharides (for example, acacia, agar, alginic acid, carrageenan, guar gum, karaya gum, and tragacanth), cellulose derivatives (for example, carboxymethylcellulose and carboxypropylcellulose), and synthetic polymers (for example, carbomers, cellulose ethers, and carboxyvinyl polymers). These disperse or swell in water to form colloidal solutions that stabilize emulsions by forming strong interfacial films around the dispersed-phase droplets and by increasing the viscosity of the external phase.

[0715] Since emulsions often contain a number of ingredients such as carbohydrates, proteins, sterols and phosphatides that can readily support the growth of microbes, these formulations often incorporate preservatives. Commonly used preservatives included in emulsion formulations include methyl paraben, propyl paraben, quaternary ammonium salts, benzalkonium chloride, esters of p-hydroxybenzoic acid, and boric acid. Antioxidants are also commonly added to emulsion formulations to prevent deterioration of the formulation. Antioxidants used can be free radical scavengers such as tocopherols, alkyl gallates, butylated hydroxyanisole, butylated hydroxytoluene, or reducing agents such as ascorbic acid and sodium metabisulfite, and antioxidant synergists such as citric acid, tartaric acid, and lecithin.

[0716] The application of emulsion formulations via dermatological, oral and parenteral routes and methods for their manufacture have been reviewed in the literature (see e.g., Ansel's Pharmaceutical Dosage Forms and Drug Delivery Systems, Allen, L V., Popovich N G., and Ansel H C., 2004, Lippincott Williams & Wilkins (8th ed.), New York, N.Y.; Idson, in Pharmaceutical Dosage Forms, Lieberman, Rieger and Banker (Eds.), 1988, Marcel Dekker, Inc., New York, N.Y., volume 1, p. 199). Emulsion formulations for oral delivery have been very widely used because of ease of formulation, as well as efficacy from an absorption and bioavailability standpoint (see e.g., Ansel's Pharmaceutical Dosage Forms and Drug Delivery Systems, Allen, L V., Popovich N G., and Ansel H C., 2004, Lippincott Williams & Wilkins (8th ed.), New York, N.Y.; Rosoff, in Pharmaceutical Dosage Forms, Lieberman, Rieger and Banker (Eds.), 1988, Marcel Dekker, Inc., New York, N.Y., volume 1, p. 245; Idson, in Pharmaceutical Dosage Forms, Lieberman, Rieger and Banker (Eds.), 1988, Marcel Dekker, Inc., New York, N.Y., volume 1, p. 199). Mineral-oil base laxatives, oil-soluble vitamins and high fat nutritive preparations are among the materials that have commonly been administered orally as o/w emulsions.

[0717] ii. Microemulsions

[0718] In one embodiment of the present disclosure, the compositions of RNAi agents and nucleic acids are formulated as microemulsions. A microemulsion can be defined as a system of water, oil and amphiphile which is a single optically isotropic and thermodynamically stable liquid solution (see e.g., Ansel's Pharmaceutical Dosage Forms and Drug Delivery Systems, Allen, L V., Popovich N G., and Ansel H C., 2004, Lippincott Williams & Wilkins (8th ed.), New York, N.Y.; Rosoff, in Pharmaceutical Dosage Forms, Lieberman, Rieger and Banker (Eds.), 1988, Marcel Dekker, Inc., New York, N.Y., volume 1, p. 245). Typically, microemulsions are systems that are prepared by first dispersing an oil in an aqueous surfactant solution and then adding a sufficient amount of a fourth component, generally an intermediate chain-length alcohol to form a transparent system. Therefore, microemulsions have also been described as thermodynamically stable, isotropically clear dispersions of two immiscible liquids that are stabilized by interfacial films of surface-active molecules (Leung and Shah, in: Controlled Release of Drugs: Polymers and Aggregate Systems, Rosoff, M., Ed., 1989, VCH Publishers, New York, pages 185-215). Microemulsions commonly are prepared via a combination of three to five components that include oil, water, surfactant, cosurfactant and electrolyte. Whether the microemulsion is of the water-in-oil (w/o) or an oil-in-water (o/w) type is dependent on the properties of the oil and surfactant used, and on the structure and geometric packing of the polar heads and hydrocarbon tails of the surfactant molecules (Schott, in Remington's Pharmaceutical Sciences, Mack Publishing Co., Easton, Pa., 1985, p. 271).

[0719] The phenomenological approach utilizing phase diagrams has been extensively studied and has yielded a comprehensive knowledge, to one skilled in the art, of how to formulate microemulsions (see e.g., Ansel's Pharmaceutical Dosage Forms and Drug Delivery Systems, Allen, L V., Popovich N G., and Ansel H C., 2004, Lippincott Williams & Wilkins (8th ed.), New York, N.Y.; Rosoff, in Pharmaceutical Dosage Forms, Lieberman, Rieger and Banker (Eds.), 1988, Marcel Dekker, Inc., New York, N.Y., volume 1, p. 245; Block, in Pharmaceutical Dosage Forms, Lieberman, Rieger and Banker (Eds.), 1988, Marcel Dekker, Inc., New York, N.Y., volume 1, p. 335). Compared to conventional emulsions, microemulsions offer the advantage of solubilizing water-insoluble drugs in a formulation of thermodynamically stable droplets that are formed spontaneously.

[0720] Surfactants used in the preparation of microemulsions include, but are not limited to, ionic surfactants, non-ionic surfactants, Brij 96, polyoxyethylene oleyl ethers, polyglycerol fatty acid esters, tetraglycerol monolaurate (ML310), tetraglycerol monooleate (MO310), hexaglycerol monooleate (PO310), hexaglycerol pentaoleate (PO500), decaglycerol monocaprate (MCA750), decaglycerol monooleate (MO750), decaglycerol sesquioleate (SO750), decaglycerol decaoleate (DA0750), alone or in combination with cosurfactants. The cosurfactant, usually a short-chain alcohol such as ethanol, 1-propanol, and 1-butanol, serves to increase the interfacial fluidity by penetrating into the surfactant film and consequently creating a disordered film because of the void space generated among surfactant molecules. Microemulsions can, however, be prepared without the use of cosurfactants and alcohol-free self-emulsifying microemulsion systems are known in the art. The aqueous phase can typically be, but is not limited to, water, an aqueous solution of the drug, glycerol, PEG300, PEG400, polyglycerols, propylene glycols, and derivatives of ethylene glycol. The oil phase can include, but is not limited to, materials such as Captex 300, Captex 355, Capmul MCM, fatty acid esters, medium chain (C8-C12) mono, di, and tri-glycerides, polyoxyethylated glyceryl fatty acid esters, fatty alcohols, polyglycolized glycerides, saturated polyglycolized C8-C10 glycerides, vegetable oils and silicone oil.

[0721] Microemulsions are particularly of interest from the standpoint of drug solubilization and the enhanced absorption of drugs. Lipid based microemulsions (both o/w and w/o) have been proposed to enhance the oral bioavailability of drugs, including peptides (see e.g., U.S. Pat. Nos. 6,191,105; 7,063,860; 7,070,802; 7,157,099; Constantinides et al., Pharmaceutical Research, 1994, 11, 1385-1390; Ritschel, Meth. Find. Exp. Clin. Pharmacol., 1993, 13, 205). Microemulsions afford advantages of improved drug solubilization, protection of drug from enzymatic hydrolysis, possible enhancement of drug absorption due to surfactant-induced alterations in membrane fluidity and permeability, ease of preparation, ease of oral administration over solid dosage forms, improved clinical potency, and decreased toxicity (see e.g., U.S. Pat. Nos. 6,191,105; 7,063,860; 7,070,802; 7,157,099; Constantinides et al., Pharmaceutical Research, 1994, 11, 1385; Ho et al., J. Pharm. Sci., 1996, 85, 138-143). Often microemulsions can form spontaneously when their components are brought together at ambient temperature. This can be particularly advantageous when formulating thermolabile drugs, peptides or RNAi agents. Microemulsions have also been effective in the transdermal delivery of active components in both cosmetic and pharmaceutical applications. It is expected that the microemulsion compositions and formulations of the present disclosure will facilitate the increased systemic absorption of RNAi agents and nucleic acids from the gastrointestinal tract, as well as improve the local cellular uptake of RNAi agents and nucleic acids.

[0722] Microemulsions of the present disclosure can also contain additional components and additives such as sorbitan monostearate (Grill 3), Labrasol, and penetration enhancers to improve the properties of the formulation and to enhance the absorption of the RNAi agents and nucleic acids of the present disclosure. Penetration enhancers used in the microemulsions of the present disclosure can be classified as belonging to one of five broad categories—surfactants, fatty acids, bile salts, chelating agents, and non-chelating non-surfactants (Lee et al., Critical Reviews in Therapeutic Drug Carrier Systems, 1991, p. 92). Each of these classes has been discussed above.

[0723] iii. Microparticles

[0724] An RNAi agent of the disclosure may be incorporated into a particle, e.g., a microparticle. Microparticles can be produced by spray-drying, but may also be produced by other methods including lyophilization, evaporation, fluid bed drying, vacuum drying, or a combination of these techniques.

[0725] iv. Penetration Enhancers

[0726] In one embodiment, the present disclosure employs various penetration enhancers to effect the efficient delivery of nucleic acids, particularly RNAi agents, to the skin of animals. Most drugs are present in solution in both ionized and nonionized forms. However, usually only lipid soluble or lipophilic drugs readily cross cell membranes. It has been discovered that even non-lipophilic drugs can cross cell membranes if the membrane to be crossed is treated with a penetration enhancer. In addition to aiding the diffusion of non-lipophilic drugs across cell membranes, penetration enhancers also enhance the permeability of lipophilic drugs.

[0727] Penetration enhancers can be classified as belonging to one of five broad categories, i.e., surfactants, fatty acids, bile salts, chelating agents, and non-chelating non-surfactants (see e.g., Malmsten, M. Surfactants and polymers in drug delivery, Informa Health Care, New York, N.Y., 2002; Lee et al., Critical Reviews in Therapeutic Drug Carrier Systems, 1991, p. 92). Each of the above mentioned classes of penetration enhancers are described below in greater detail.

[0728] Surfactants (or “surface-active agents”) are chemical entities which, when dissolved in an aqueous solution, reduce the surface tension of the solution or the interfacial tension between the aqueous solution and another liquid, with the result that absorption of RNAi agents through the mucosa is enhanced. In addition to bile salts and fatty acids, these penetration enhancers include, for example, sodium lauryl sulfate, polyoxyethylene-9-lauryl ether and polyoxyethylene-20-cetyl ether) (see e.g., Malmsten, M. Surfactants and polymers in drug delivery, Informa Health Care, New York, N.Y., 2002; Lee et al., Critical Reviews in Therapeutic Drug Carrier Systems, 1991, p. 92); and perfluorochemical emulsions, such as FC-43. Takahashi et al., J. Pharm. Pharmacol., 1988, 40, 252).

[0729] Various fatty acids and their derivatives which act as penetration enhancers include, for example, oleic acid, lauric acid, capric acid (n-decanoic acid), myristic acid, palmitic acid, stearic acid, linoleic acid, linolenic acid, dicaprate, tricaprate, monoolein (1-monooleoyl-rac-glycerol), dilaurin, caprylic acid, arachidonic acid, glycerol 1-monocaprate, 1-dodecylazacycloheptan-2-one, acylcarnitines, acylcholines, C₁₋₂₀ alkyl esters thereof (e.g., methyl, isopropyl and t-butyl), and mono- and di-glycerides thereof (i.e., oleate, laurate, caprate, myristate, palmitate, stearate, linoleate, etc.) (see e.g., Touitou, E., et al. Enhancement in Drug Delivery, CRC Press, Danvers, Mass., 2006; Lee et al., Critical Reviews in Therapeutic Drug Carrier Systems, 1991, p. 92; Muranishi, Critical Reviews in Therapeutic Drug Carrier Systems, 1990, 7, 1-33; El Hariri et al., J. Pharm. Pharmacol., 1992, 44, 651-654).

[0730] The physiological role of bile includes the facilitation of dispersion and absorption of lipids and fat-soluble vitamins (see e.g., Malmsten, M. Surfactants and polymers in drug delivery, Informa Health Care, New York, N.Y., 2002; Brunton, Chapter 38 in: Goodman & Gilman's The Pharmacological Basis of Therapeutics, 9th Ed., Hardman et al. Eds., McGraw-Hill, New York, 1996, pp. 934-935). Various natural bile salts, and their synthetic derivatives, act as penetration enhancers. Thus the term “bile salts” includes any of the naturally occurring components of bile as well as any of their synthetic derivatives. Suitable bile salts include, for example, cholic acid (or its pharmaceutically acceptable sodium salt, sodium cholate), dehydrocholic acid (sodium dehydrocholate), deoxycholic acid (sodium deoxycholate), glucholic acid (sodium glucholate), glycholic acid (sodium glycocholate), glycodeoxycholic acid (sodium glycodeoxycholate), taurocholic acid (sodium taurocholate), taurodeoxycholic acid (sodium taurodeoxycholate), chenodeoxycholic acid (sodium chenodeoxycholate), ursodeoxycholic acid (UDCA), sodium tauro-24,25-dihydro-fusidate (STDHF), sodium glycodihydrofusidate and polyoxyethylene-9-lauryl ether (POE) (see e.g., Malmsten, M. Surfactants and polymers in drug delivery, Informa Health Care, New York, N.Y., 2002; Lee et al., Critical Reviews in Therapeutic Drug Carrier Systems, 1991, page 92; Swinyard, Chapter 39 In: Remington's Pharmaceutical Sciences, 18th Ed., Gennaro, ed., Mack Publishing Co., Easton, Pa., 1990, pages 782-783; Muranishi, Critical Reviews in Therapeutic Drug Carrier Systems, 1990, 7, 1-33; Yamamoto et al., J. Pharm. Exp. Ther., 1992, 263, 25; Yamashita et al., J. Pharm. Sci., 1990, 79, 579-583).

[0731] Chelating agents, as used in connection with the present disclosure, can be defined as compounds that remove metallic ions from solution by forming complexes therewith, with the result that absorption of RNAi agents through the mucosa is enhanced. With regards to their use as penetration enhancers in the present disclosure, chelating agents have the added advantage of also serving as DNase inhibitors, as most characterized DNA nucleases require a divalent metal ion for catalysis and are thus inhibited by chelating agents (Jarrett, J. Chromatogr., 1993, 618, 315-339). Suitable chelating agents include but are not limited to disodium ethylenediaminetetraacetate (EDTA), citric acid, salicylates (e.g., sodium salicylate, 5-methoxysalicylate and homovanilate), N-acyl derivatives of collagen, laureth-9 and N-amino acyl derivatives of beta-diketones (enamines)(see e.g., Katdare, A. et al., Excipient development for pharmaceutical, biotechnology, and drug delivery, CRC Press, Danvers, Mass., 2006; Lee et al., Critical Reviews in Therapeutic Drug Carrier Systems, 1991, page 92; Muranishi, Critical Reviews in Therapeutic Drug Carrier Systems, 1990, 7, 1-33; Buur et al., J. Control Rel., 1990, 14, 43-51).

[0732] As used herein, non-chelating non-surfactant penetration enhancing compounds can be defined as compounds that demonstrate insignificant activity as chelating agents or as surfactants but that nonetheless enhance absorption of RNAi agents through the alimentary mucosa (see e.g., Muranishi, Critical Reviews in Therapeutic Drug Carrier Systems, 1990, 7, 1-33). This class of penetration enhancers includes, for example, unsaturated cyclic ureas, 1-alkyl- and 1-alkenylazacyclo-alkanone derivatives (Lee et al., Critical Reviews in Therapeutic Drug Carrier Systems, 1991, page 92); and non-steroidal anti-inflammatory agents such as diclofenac sodium, indomethacin and phenylbutazone (Yamashita et al., J. Pharm. Pharmacol., 1987, 39, 621-626).

[0733] Agents that enhance uptake of RNAi agents at the cellular level can also be added to the pharmaceutical and other compositions of the present disclosure. For example, cationic lipids, such as lipofectin (Junichi et al, U.S. Pat. No. 5,705,188), cationic glycerol derivatives, and polycationic molecules, such as polylysine (WO 97/30731), are also known to enhance the cellular uptake of dsRNAs.

[0734] Other agents can be utilized to enhance the penetration of the administered nucleic acids, including glycols such as ethylene glycol and propylene glycol, pyrrols such as 2-pyrrol, azones, and terpenes such as limonene and menthone.

[0735] vi. Excipients

[0736] In contrast to a carrier compound, a “pharmaceutical carrier” or “excipient” is a pharmaceutically acceptable solvent, suspending agent or any other pharmacologically inert vehicle for delivering one or more nucleic acids to an animal. The excipient can be liquid or solid and is selected, with the planned manner of administration in mind, so as to provide for the desired bulk, consistency, etc., when combined with a nucleic acid and the other components of a given pharmaceutical composition. Typical pharmaceutical carriers include, but are not limited to, binding agents (e.g., pregelatinized maize starch, polyvinylpyrrolidone or hydroxypropyl methylcellulose, etc.); fillers (e.g., lactose and other sugars, microcrystalline cellulose, pectin, gelatin, calcium sulfate, ethyl cellulose, polyacrylates or calcium hydrogen phosphate, etc.); lubricants (e.g., magnesium stearate, talc, silica, colloidal silicon dioxide, stearic acid, metallic stearates, hydrogenated vegetable oils, corn starch, polyethylene glycols, sodium benzoate, sodium acetate, etc.); disintegrants (e.g., starch, sodium starch glycolate, etc.); and wetting agents (e.g., sodium lauryl sulphate, etc).

[0737] Pharmaceutically acceptable organic or inorganic excipients suitable for non-parenteral administration which do not deleteriously react with nucleic acids can also be used to formulate the compositions of the present disclosure. Suitable pharmaceutically acceptable carriers include, but are not limited to, water, salt solutions, alcohols, polyethylene glycols, gelatin, lactose, amylose, magnesium stearate, talc, silicic acid, viscous paraffin, hydroxymethylcellulose, polyvinylpyrrolidone and the like.

[0738] Formulations for topical administration of nucleic acids can include sterile and non-sterile aqueous solutions, non-aqueous solutions in common solvents such as alcohols, or solutions of the nucleic acids in liquid or solid oil bases. The solutions can also contain buffers, diluents and other suitable additives. Pharmaceutically acceptable organic or inorganic excipients suitable for non-parenteral administration which do not deleteriously react with nucleic acids can be used.

[0739] Suitable pharmaceutically acceptable excipients include, but are not limited to, water, salt solutions, alcohol, polyethylene glycols, gelatin, lactose, amylose, magnesium stearate, talc, silicic acid, viscous paraffin, hydroxymethylcellulose, polyvinylpyrrolidone and the like.

[0740] vii. Other Components

[0741] The compositions of the present disclosure can additionally contain other adjunct components conventionally found in pharmaceutical compositions, at their art-established usage levels. Thus, for example, the compositions can contain additional, compatible, pharmaceutically-active materials such as, for example, antipruritics, astringents, local anesthetics or anti-inflammatory agents, or can contain additional materials useful in physically formulating various dosage forms of the compositions of the present disclosure, such as dyes, flavoring agents, preservatives, antioxidants, opacifiers, thickening agents and stabilizers. However, such materials, when added, should not unduly interfere with the biological activities of the components of the compositions of the present disclosure. The formulations can be sterilized and, if desired, mixed with auxiliary agents, e.g., lubricants, preservatives, stabilizers, wetting agents, emulsifiers, salts for influencing osmotic pressure, buffers, colorings, flavorings or aromatic substances and the like which do not deleteriously interact with the nucleic acid(s) of the formulation.

[0742] Aqueous suspensions can contain substances which increase the viscosity of the suspension including, for example, sodium carboxymethylcellulose, sorbitol or dextran. The suspension can also contain stabilizers.

[0743] In some embodiments, pharmaceutical compositions featured in the disclosure include (a) one or more RNAi agents and (b) one or more agents which function by a non-RNAi mechanism and which are useful in treating an APOE-associated neurodegenerative disorder. Examples of such agents include, but are not limited to SSRIs, venlafaxine, bupropion, and atypical antipsychotics.

[0744] Toxicity and therapeutic efficacy of such compounds can be determined by standard pharmaceutical procedures in cell cultures or experimental animals, e.g., for determining the LD₅₀ (the dose lethal to 50% of the population) and the ED₅₀ (the dose therapeutically effective in 50% of the population). The dose ratio between toxic and therapeutic effects is the therapeutic index and it can be expressed as the ratio LD₅₀/ED₅₀. Compounds that exhibit high therapeutic indices are preferred.

[0745] The data obtained from cell culture assays and animal studies can be used in formulating a range of dosage for use in humans. The dosage of compositions featured herein in the disclosure lies generally within a range of circulating concentrations that include the ED₅₀ with little or no toxicity. The dosage can vary within this range depending upon the dosage form employed and the route of administration utilized. For any compound used in the methods featured in the disclosure, the therapeutically effective dose can be estimated initially from cell culture assays. A dose can be formulated in animal models to achieve a circulating plasma concentration range of the compound or, when appropriate, of the polypeptide product of a target sequence (e.g., achieving a decreased concentration of the polypeptide) that includes the IC₅₀ (i.e., the concentration of the test compound which achieves a half-maximal inhibition of symptoms) as determined in cell culture. Such information can be used to more accurately determine useful doses in humans. Levels in plasma can be measured, for example, by high performance liquid chromatography.

[0746] In addition to their administration, as discussed above, the RNAi agents featured in the disclosure can be administered in combination with other known agents effective in treatment of pathological processes mediated by nucleotide repeat expression. In any event, the administering physician can adjust the amount and timing of RNAi agent administration on the basis of results observed using standard measures of efficacy known in the art or described herein.

### VIII. Kits

[0747] In certain aspects, the instant disclosure provides kits that include a suitable container containing a pharmaceutical formulation of a siRNA compound, e.g., a double-stranded siRNA compound, or siRNA compound, (e.g., a precursor, e.g., a larger siRNA compound which can be processed into a siRNA compound, or a DNA which encodes an siRNA compound, e.g., a double-stranded siRNA compound, or siRNA compound, or precursor thereof). In certain embodiments the individual components of the pharmaceutical formulation may be provided in one container. Alternatively, it may be desirable to provide the components of the pharmaceutical formulation separately in two or more containers, e.g., one container for a siRNA compound preparation, and at least another for a carrier compound. The kit may be packaged in a number of different configurations such as one or more containers in a single box. The different components can be combined, e.g., according to instructions provided with the kit. The components can be combined according to a method described herein, e.g., to prepare and administer a pharmaceutical composition. The kit can also include a delivery device.

### IX. Methods for Inhibiting APOE Expression

[0748] The present disclosure also provides methods of inhibiting expression of an APOE gene in a cell. The methods include contacting a cell with an RNAi agent, e.g., double stranded RNAi agent, in an amount effective to inhibit expression of APOE in the cell, thereby inhibiting expression of APOE in the cell. In certain embodiments of the disclosure, APOE is inhibited preferentially in CNS (e.g., brain) cells. In other embodiments of the disclosure, APOE is inhibited preferentially in the liver (e.g., hepatocytes). In certain embodiments of the disclosure, APOE is inhibited in CNS (e.g., brain) cells and in liver (e.g., hepatocytes) cells.

[0749] In some embodiments, the expression of APOE2 is inhibited. In some embodiments, the expression of APOE3 is inhibited. In some embodiments, the expression of APOE4 is inhibited. In some embodiments, the expression of APOE2 and APOE3 is inhibited. In some embodiments, the expression of APOE2, APOE3, and APOE4 is inhibited. In some embodiments, the expression of APOE4 is inhibited and the expression of APOE2 and APOE3 is substantially not inhibited, e.g., expression of APOE2 and APOE3 is inhibited by no more than 10%.

[0750] Contacting of a cell with a RNAi agent, e.g., a double stranded RNAi agent, may be done in vitro or in vivo. Contacting a cell in vivo with the RNAi agent includes contacting a cell or group of cells within a subject, e.g., a human subject, with the RNAi agent. Combinations of in vitro and in vivo methods of contacting a cell are also possible.

[0751] Contacting a cell may be direct or indirect, as discussed above. Furthermore, contacting a cell may be accomplished via a targeting ligand, including any ligand described herein or known in the art. In some embodiments, the targeting ligand is a carbohydrate moiety, e.g., a GalNAc ligand, or any other ligand that directs the RNAi agent to a site of interest.

[0752] The term “inhibiting,” as used herein, is used interchangeably with “reducing,” “silencing,” “downregulating,” “suppressing” and other similar terms, and includes any level of inhibition. In certain embodiments, a level of inhibition, e.g., for an RNAi agent of the instant disclosure, can be assessed in cell culture conditions, e.g., wherein cells in cell culture are transfected via Lipofectamine™-mediated transfection at a concentration in the vicinity of a cell of 10 nM or less, 1 nM or less, etc. Knockdown of a given RNAi agent can be determined via comparison of pre-treated levels in cell culture versus post-treated levels in cell culture, optionally also comparing against cells treated in parallel with a scrambled or other form of control RNAi agent. Knockdown in cell culture of, e.g., preferably 50% or more, can thereby be identified as indicative of “inhibiting” or “reducing”, “downregulating” or “suppressing”, etc. having occurred. It is expressly contemplated that assessment of targeted mRNA or encoded protein levels (and therefore an extent of “inhibiting”, etc. caused by a RNAi agent of the disclosure) can also be assessed in in vivo systems for the RNAi agents of the instant disclosure, under properly controlled conditions as described in the art.

[0753] The phrase “inhibiting expression of an APOE gene” or “inhibiting expression of APOE,” as used herein, includes inhibition of expression of any APOE gene (such as, e.g., a mouse APOE gene, a rat APOE gene, a monkey APOE gene, or a human APOE gene) as well as variants or mutants of an APOE gene that encode an APOE protein. Thus, the APOE gene may be a wild-type APOE gene, a mutant APOE gene, or a transgenic APOE gene in the context of a genetically manipulated cell, group of cells, or organism.

[0754] “Inhibiting expression of an APOE gene” includes any level of inhibition of an APOE gene, e.g., at least partial suppression of the expression of an APOE gene, such as an inhibition by at least 20%. In certain embodiments, inhibition is by at least 30%, at least 40%, preferably at least 50%, at least about 60%, at least 70%, at least about 80%, at least 85%, at least 90%, at least 95%, at least 96%, at least 97%, at least 98%, or at least 99%; or to below the level of detection of the assay method.

[0755] The expression of an APOE gene may be assessed based on the level of any variable associated with APOE gene expression, e.g., APOE mRNA level or APOE protein level, or, for example, the level of amyloid or tau deposition.

[0756] Inhibition may be assessed by a decrease in an absolute or relative level of one or more of these variables compared with a control level. The control level may be any type of control level that is utilized in the art, e.g., a pre-dose baseline level, or a level determined from a similar subject, cell, or sample that is untreated or treated with a control (such as, e.g., buffer only control or inactive agent control).

[0757] In some embodiments of the methods of the disclosure, expression of an APOE gene is inhibited by at least 20%, 30%, 40%, preferably at least 50%, 60%, 70%, 80%, 85%, 90%, or 95%, or to below the level of detection of the assay. In certain embodiments, the methods include a clinically relevant inhibition of expression of APOE, e.g. as demonstrated by a clinically relevant outcome after treatment of a subject with an agent to reduce the expression of APOE.

[0758] Inhibition of the expression of an APOE gene may be manifested by a reduction of the amount of mRNA expressed by a first cell or group of cells (such cells may be present, for example, in a sample derived from a subject) in which an APOE gene is transcribed and which has or have been treated (e.g., by contacting the cell or cells with a RNAi agent of the disclosure, or by administering a RNAi agent of the disclosure to a subject in which the cells are or were present) such that the expression of an APOE gene is inhibited, as compared to a second cell or group of cells substantially identical to the first cell or group of cells but which has not or have not been so treated (control cell(s) not treated with a RNAi agent or not treated with a RNAi agent targeted to the gene of interest). The degree of inhibition may be expressed in terms of:

$$\frac{( mRNA in control cells ) - ( mRNA in treated cells )}{( mRNA in control cells )} \cdot 100 \%$$

[0759] In other embodiments, inhibition of the expression of an APOE gene may be assessed in terms of a reduction of a parameter that is functionally linked to an APOE gene expression, e.g., APOE protein expression. APOE gene silencing may be determined in any cell expressing APOE, either endogenous or heterologous from an expression construct, and by any assay known in the art.

[0760] Inhibition of the expression of an APOE protein may be manifested by a reduction in the level of the APOE protein that is expressed by a cell or group of cells (e.g., the level of protein expressed in a sample derived from a subject). As explained above, for the assessment of mRNA suppression, the inhibition of protein expression levels in a treated cell or group of cells may similarly be expressed as a percentage of the level of protein in a control cell or group of cells.

[0761] A control cell or group of cells that may be used to assess the inhibition of the expression of an APOE gene includes a cell or group of cells that has not yet been contacted with an RNAi agent of the disclosure. For example, the control cell or group of cells may be derived from an individual subject (e.g., a human or animal subject) prior to treatment of the subject with an RNAi agent.

[0762] The level of APOE mRNA that is expressed by a cell or group of cells may be determined using any method known in the art for assessing mRNA expression. In one embodiment, the level of expression of APOE in a sample is determined by detecting a transcribed polynucleotide, or portion thereof, e.g., mRNA of the APOE gene. RNA may be extracted from cells using RNA extraction techniques including, for example, using acid phenol/guanidine isothiocyanate extraction (RNAzol B; Biogenesis), RNeasy™ RNA preparation kits (Qiagen®) or PAXgene (PreAnalytix, Switzerland). Typical assay formats utilizing ribonucleic acid hybridization include nuclear run-on assays, RT-PCR, RNase protection assays, northern blotting, in situ hybridization, and microarray analysis. Circulating APOE mRNA may be detected using methods the described in WO2012/177906, the entire contents of which are hereby incorporated herein by reference.

[0763] In some embodiments, the level of expression of APOE is determined using a nucleic acid probe. The term “probe”, as used herein, refers to any molecule that is capable of selectively binding to a specific APOE nucleic acid or protein, or fragment thereof. Probes can be synthesized by one of skill in the art, or derived from appropriate biological preparations. Probes may be specifically designed to be labeled. Examples of molecules that can be utilized as probes include, but are not limited to, RNA, DNA, proteins, antibodies, and organic molecules.

[0764] Isolated mRNA can be used in hybridization or amplification assays that include, but are not limited to, Southern or northern analyses, polymerase chain reaction (PCR) analyses and probe arrays. One method for the determination of mRNA levels involves contacting the isolated mRNA with a nucleic acid molecule (probe) that can hybridize to APOE mRNA. In one embodiment, the mRNA is immobilized on a solid surface and contacted with a probe, for example by running the isolated mRNA on an agarose gel and transferring the mRNA from the gel to a membrane, such as nitrocellulose. In an alternative embodiment, the probe(s) are immobilized on a solid surface and the mRNA is contacted with the probe(s), for example, in an Affymetrix® gene chip array. A skilled artisan can readily adapt known mRNA detection methods for use in determining the level of APOE mRNA.

[0765] An alternative method for determining the level of expression of APOE in a sample involves the process of nucleic acid amplification or reverse transcriptase (to prepare cDNA) of for example mRNA in the sample, e.g., by RT-PCR (the experimental embodiment set forth in Mullis, 1987, U.S. Pat. No. 4,683,202), ligase chain reaction (Barany (1991) Proc. Natl. Acad. Sci. USA 88:189-193), self sustained sequence replication (Guatelli et al. (1990) Proc. Natl. Acad. Sci. USA 87:1874-1878), transcriptional amplification system (Kwoh et al. (1989) Proc. Natl. Acad. Sci. USA 86:1173-1177), Q-Beta Replicase (Lizardi et al. (1988) Bio/Technology 6:1197), rolling circle replication (Lizardi et al., U.S. Pat. No. 5,854,033) or any other nucleic acid amplification method, followed by the detection of the amplified molecules using techniques well known to those of skill in the art. These detection schemes are especially useful for the detection of nucleic acid molecules if such molecules are present in very low numbers. In particular aspects of the disclosure, the level of expression of APOE is determined by quantitative fluorogenic RT-PCR (i.e., the TaqMan™ System), by a Dual-Glo® Luciferase assay, or by other art-recognized method for measurement of APOE expression or mRNA level.

[0766] The expression level of APOE mRNA may be monitored using a membrane blot (such as used in hybridization analysis such as northern, Southern, dot, and the like), or microwells, sample tubes, gels, beads or fibers (or any solid support comprising bound nucleic acids). See U.S. Pat. Nos. 5,770,722, 5,874,219, 5,744,305, 5,677,195 and 5,445,934, which are incorporated herein by reference. The determination of APOE expression level may also comprise using nucleic acid probes in solution.

[0767] In some embodiments, the level of mRNA expression is assessed using branched DNA (bDNA) assays or real time PCR (qPCR). The use of this PCR method is described and exemplified in the Examples presented herein. Such methods can also be used for the detection of APOE nucleic acids.

[0768] The level of APOE protein expression may be determined using any method known in the art for the measurement of protein levels. Such methods include, for example, electrophoresis, capillary electrophoresis, high performance liquid chromatography (HPLC), thin layer chromatography (TLC), hyperdiffusion chromatography, fluid or gel precipitin reactions, absorption spectroscopy, a colorimetric assays, spectrophotometric assays, flow cytometry, immunodiffusion (single or double), immunoelectrophoresis, western blotting, radioimmunoassay (RIA), enzyme-linked immunosorbent assays (ELISAs), immunofluorescent assays, electrochemiluminescence assays, and the like. Such assays can also be used for the detection of proteins indicative of the presence or replication of APOE proteins.

[0769] In some embodiments, the efficacy of the methods of the disclosure in the treatment of an APOE-related disease is assessed by a decrease in APOE mRNA level (e.g, by assessment of a CSF sample for APOE level, by brain biopsy, or otherwise).

[0770] In some embodiments, the efficacy of the methods of the disclosure in the treatment of an APOE-related disease is assessed by a decrease in APOE mRNA level (e.g, by assessment of a liver sample for APOE level, by biopsy, or otherwise).

[0771] In some embodiments of the methods of the disclosure, the RNAi agent is administered to a subject such that the RNAi agent is delivered to a specific site within the subject. The inhibition of expression of APOE may be assessed using measurements of the level or change in the level of APOE mRNA or APOE protein in a sample derived from a specific site within the subject, e.g., CNS cells. In certain embodiments, the methods include a clinically relevant inhibition of expression of APOE, e.g. as demonstrated by a clinically relevant outcome after treatment of a subject with an agent to reduce the expression of APOE.

[0772] As used herein, the terms detecting or determining a level of an analyte are understood to mean performing the steps to determine if a material, e.g., protein, RNA, is present. As used herein, methods of detecting or determining include detection or determination of an analyte level that is below the level of detection for the method used.

### X. Methods of Treating or Preventing APOE-Associated Neurodegenerative Diseases

[0773] The present disclosure also provides methods of using a RNAi agent of the disclosure or a composition containing a RNAi agent of the disclosure to reduce or inhibit APOE expression in a cell. The methods include contacting the cell with a dsRNA of the disclosure and maintaining the cell for a time sufficient to obtain degradation of the mRNA transcript of an APOE gene, thereby inhibiting expression of the APOE gene in the cell. Reduction in gene expression can be assessed by any methods known in the art. For example, a reduction in the expression of APOE may be determined by determining the mRNA expression level of APOE using methods routine to one of ordinary skill in the art, e.g., northern blotting, qRT-PCR; by determining the protein level of APOE using methods routine to one of ordinary skill in the art, such as western blotting, immunological techniques.

[0774] In the methods of the disclosure the cell may be contacted in vitro or in vivo, i.e., the cell may be within a subject.

[0775] A cell suitable for treatment using the methods of the disclosure may be any cell that expresses an APOE gene. A cell suitable for use in the methods of the disclosure may be a mammalian cell, e.g., a primate cell (such as a human cell or a non-human primate cell, e.g., a monkey cell or a chimpanzee cell), a non-primate cell (such as a a rat cell, or a mouse cell. In one embodiment, the cell is a human cell, e.g., a human CNS cell. In one embodiment, the cell is a human cell, e.g., a human liver cell. In one embodiment, the cell is a human cell, e.g., a human CNS cell and a human liver cell.

[0776] APOE expression is inhibited in the cell by at least about 30, 40, 50, 55, 60, 65, 70, 75, 80, 85, 90, 95, 96, 97, 98, 99, or about 100%, i.e., to below the level of detection. In preferred embodiments, APOE expression is inhibited by at least 50%.

[0777] The in vivo methods of the disclosure may include administering to a subject a composition containing a RNAi agent, where the RNAi agent includes a nucleotide sequence that is complementary to at least a part of an RNA transcript of the APOE gene of the mammal to be treated. When the organism to be treated is a mammal such as a human, the composition can be administered by any means known in the art including, but not limited to oral, intraperitoneal, or parenteral routes, including intracranial (e.g., intraventricular, intraparenchymal, and intrathecal), intravenous, intramuscular, intravitreal, subcutaneous, transdermal, airway (aerosol), nasal, rectal, and topical (including buccal and sublingual) administration. In certain embodiments, the compositions are administered by intravenous infusion or injection. In certain embodiments, the compositions are administered by subcutaneous injection. In certain embodiments, the compositions are administered by intrathecal injection.

[0778] In some embodiments, the administration is via a depot injection. A depot injection may release the RNAi agent in a consistent way over a prolonged time period. Thus, a depot injection may reduce the frequency of dosing needed to obtain a desired effect, e.g., a desired inhibition of APOE, or a therapeutic or prophylactic effect. A depot injection may also provide more consistent serum concentrations. Depot injections may include subcutaneous injections or intramuscular injections. In preferred embodiments, the depot injection is a subcutaneous injection.

[0779] In some embodiments, the administration is via a pump. The pump may be an external pump or a surgically implanted pump. In certain embodiments, the pump is a subcutaneously implanted osmotic pump. In other embodiments, the pump is an infusion pump. An infusion pump may be used for intracranial, intravenous, subcutaneous, arterial, or epidural infusions. In preferred embodiments, the infusion pump is a subcutaneous infusion pump. In other embodiments, the pump is a surgically implanted pump that delivers the RNAi agent to the CNS.

[0780] The mode of administration may be chosen based upon whether local or systemic treatment is desired and based upon the area to be treated. The route and site of administration may be chosen to enhance targeting.

[0781] In one aspect, the present disclosure also provides methods for inhibiting the expression of an APOE gene in a mammal. The methods include administering to the mammal a composition comprising a dsRNA that targets an APOE gene in a cell of the mammal and maintaining the mammal for a time sufficient to obtain degradation of the mRNA transcript of the APOE gene, thereby inhibiting expression of the APOE gene in the cell. Reduction in gene expression can be assessed by any methods known it the art and by methods, e.g. qRT-PCR, described herein. Reduction in protein production can be assessed by any methods known it the art and by methods, e.g. ELISA, described herein. In one embodiment, a CNS biopsy sample or a cerebrospinal fluid (CSF) sample serves as the tissue material for monitoring the reduction in APOE gene or protein expression (or of a proxy therefore).

[0782] The present disclosure further provides methods of treatment of a subject in need thereof. The treatment methods of the disclosure include administering an RNAi agent of the disclosure to a subject, e.g., a subject that would benefit from inhibition of APOE expression, in a therapeutically effective amount of a RNAi agent targeting an APOE gene or a pharmaceutical composition comprising a RNAi agent targeting a APOE gene.

[0783] In addition, the present disclosure provides methods of preventing, treating or inhibiting the progression of an APOE-associated neurodegenerative disease or disorder, such as an amyloid-β-mediated disease, e.g., Alzheimer's's disease, Down's syndrome, and cerebral amyloid angiopathy, or a tau-mediated disease, e.g. a primary tauopathy, such as Frontotemporal dementia (FTD), Progressive supranuclear palsy (PSP), Cordicobasal degeneration (CBD), Pick's disease (PiD), Globular glial tauopathies (GGTs), frontotemporal dementia with parkinsonism (FTDP, FTDP-17), Chronic traumatic encelopathy (CTE), Dementia pugilistica, Frontotemporal lobar degeneration (FTLD), Argyrophilic grain disease (AGD), and Primary age-related tauopathy (PART), or a secondary tauopathy, e.g., AD, Creuzfeld Jakob's disease, Down's Syndrome, and Familial British Dementia.

[0784] The methods include administering to the subject a therapeutically effective amount of any of the RNAi agent, e.g., dsRNA agents, or the pharmaceutical composition provided herein, thereby preventing, treating or inhibiting the progression of the APOE-associated neurodegenerative disease or disorder in the subject.

[0785] An RNAi agent of the disclosure may be administered as a “free RNAi agent.” A free RNAi agent is administered in the absence of a pharmaceutical composition. The naked RNAi agent may be in a suitable buffer solution. The buffer solution may comprise acetate, citrate, prolamine, carbonate, or phosphate, or any combination thereof. In one embodiment, the buffer solution is phosphate buffered saline (PBS). The pH and osmolarity of the buffer solution containing the RNAi agent can be adjusted such that it is suitable for administering to a subject.

[0786] Alternatively, an RNAi agent of the disclosure may be administered as a pharmaceutical composition, such as a dsRNA liposomal formulation.

[0787] Subjects that would benefit from a reduction or inhibition of APOE gene expression are those having an APOE-associated neurodegenerative disease.

[0788] The disclosure further provides methods for the use of a RNAi agent or a pharmaceutical composition thereof, e.g., for treating a subject that would benefit from reduction or inhibition of APOE expression, e.g., a subject having an APOE-associated neurodegenerative disorder, in combination with other pharmaceuticals or other therapeutic methods, e.g., with known pharmaceuticals or known therapeutic methods, such as, for example, those which are currently employed for treating these disorders. For example, in certain embodiments, an RNAi agent targeting APOE is administered in combination with, e.g., an agent useful in treating an APOE-associated neurodegenerative disorder as described elsewhere herein or as otherwise known in the art. For example, additional agents suitable for treating a subject that would benefit from reduction in APOE expression, e.g., a subject having an APOE-associated neurodegenerative disorder, may include agents currently used to treat symptoms of APOE. The RNAi agent and additional therapeutic agents may be administered at the same time or in the same combination, e.g., intrathecally, or the additional therapeutic agent can be administered as part of a separate composition or at separate times or by another method known in the art or described herein.

[0789] In one embodiment, the method includes administering a composition featured herein such that expression of the target APOE gene is decreased, for at least one month. In preferred embodiments, expression is decreased for at least 2 months, 3 months, or 6 months.

[0790] Preferably, the RNAi agents useful for the methods and compositions featured herein specifically target RNAs (primary or processed) of the target APOE gene. Compositions and methods for inhibiting the expression of these genes using RNAi agents can be prepared and performed as described herein.

[0791] Administration of the dsRNA according to the methods of the disclosure may result in a reduction of the severity, signs, symptoms, or markers of such diseases or disorders in a patient with an APOE-associated neurodegenerative disorder. By “reduction” in this context is meant a statistically significant or clinically significant decrease in such level. The reduction can be, for example, at least 5%, 10%, 15%, 20%, 25%, 30%, 35%, 40%, 45%, 50%, 55%, 60%, 65%, 70%, 75%, 80%, 85%, 90%, 95%, or about 100%.

[0792] Efficacy of treatment or prevention of disease can be assessed, for example by measuring disease progression, disease remission, symptom severity, reduction in pain, quality of life, dose of a medication required to sustain a treatment effect, level of a disease marker or any other measurable parameter appropriate for a given disease being treated or targeted for prevention. It is well within the ability of one skilled in the art to monitor efficacy of treatment or prevention by measuring any one of such parameters, or any combination of parameters. For example, efficacy of treatment of an APOE-associated neurodegenerative disorder may be assessed, for example, by periodic monitoring of a subject's cognition, learning, and/or memory. Comparisons of the later readings with the initial readings provide a physician an indication of whether the treatment is effective. It is well within the ability of one skilled in the art to monitor efficacy of treatment or prevention by measuring any one of such parameters, or any combination of parameters. In connection with the administration of a RNAi agent targeting APOE or pharmaceutical composition thereof, “effective against” an APOE-associated neurodegenerative disorder indicates that administration in a clinically appropriate manner results in a beneficial effect for at least a statistically significant fraction of patients, such as an improvement of symptoms, a cure, a reduction in disease, extension of life, improvement in quality of life, or other effect generally recognized as positive by medical doctors familiar with treating APOE-associated neurodegenerative disorders and the related causes.

[0793] A treatment or preventive effect is evident when there is a statistically significant improvement in one or more parameters of disease status, or by a failure to worsen or to develop symptoms where they would otherwise be anticipated. As an example, a favorable change of at least 10% in a measurable parameter of disease, and preferably at least 20%, 30%, 40%, 50% or more can be indicative of effective treatment. Efficacy for a given RNAi agent drug or formulation of that drug can also be judged using an experimental animal model for the given disease as known in the art. When using an experimental animal model, efficacy of treatment is evidenced when a statistically significant reduction in a marker or symptom is observed.

[0794] Alternatively, the efficacy can be measured by a reduction in the severity of disease as determined by one skilled in the art of diagnosis based on a clinically accepted disease severity grading scale. Any positive change resulting in e.g., lessening of severity of disease measured using the appropriate scale, represents adequate treatment using a RNAi agent or RNAi agent formulation as described herein.

[0795] Subjects can be administered a therapeutic amount of dsRNA, such as about 0.01 mg/kg to about 200 mg/kg.

[0796] The RNAi agent can be administered intrathecally, via intravitreal injection, or by intravenous infusion over a period of time, on a regular basis. In certain embodiments, after an initial treatment regimen, the treatments can be administered on a less frequent basis. Administration of the RNAi agent can reduce APOE levels, e.g., in a cell, tissue, blood, CSF sample or other compartment of the patient by at least 20%, 30%, 40%, 50%, 55%, 60%, 65%, 70,% 75%, 80%, 85%, 90%, 95%, 96%, 97%, 98%, or at least about 99% or more. In a preferred embodiment, administration of the RNAi agent can reduce APOE levels, e.g., in a cell, tissue, blood, CSF sample or other compartment of the patient by at least 50%.

[0797] Before administration of a full dose of the RNAi agent, patients can be administered a smaller dose, such as a 5% infusion reaction, and monitored for adverse effects, such as an allergic reaction. In another example, the patient can be monitored for unwanted immunostimulatory effects, such as increased cytokine (e.g., TNF-alpha or INF-alpha) levels.

[0798] Alternatively, the RNAi agent can be administered subcutaneously, i.e., by subcutaneous injection. One or more injections may be used to deliver the desired, e.g., monthly dose of RNAi agent to a subject. The injections may be repeated over a period of time. The administration may be repeated on a regular basis. In certain embodiments, after an initial treatment regimen, the treatments can be administered on a less frequent basis. A repeat-dose regime may include administration of a therapeutic amount of RNAi agent on a regular basis, such as monthly or extending to once a quarter, twice per year, once per year. In certain embodiments, the RNAi agent is administered about once per month to about once per quarter (i.e., about once every three months).

[0799] Unless otherwise defined, all technical and scientific terms used herein have the same meaning as commonly understood by one of ordinary skill in the art to which this invention belongs. Although methods and materials similar or equivalent to those described herein can be used in the practice or testing of the RNAi agents and methods featured in the invention, suitable methods and materials are described below. All publications, patent applications, patents, and other references mentioned herein are incorporated by reference in their entirety. In case of conflict, the present specification, including definitions, will control. In addition, the materials, methods, and examples are illustrative only and not intended to be limiting.

[0800] An informal Sequence Listing is filed herewith and forms part of the specification as filed.

### EXAMPLES

### Example 1. RNAi Agent Design, Synthesis, Selection, and In Vitro Evaluation

[0801] This Example describes methods for the design, synthesis, selection, and in vitro evaluation of APOE RNAi agents.

### Source of Reagents

[0802] Where the source of a reagent is not specifically given herein, such reagent can be obtained from any supplier of reagents for molecular biology at a quality/purity standard for application in molecular biology.

### Bioinformatics

[0803] A set of siRNAs targeting the human apolipoprotein E (APOE; human NCBI refseqID NM_000041.4; NCBI GeneID: 348) was designed using custom R and Python scripts. The human NM_000041 REFSEQ mRNA, version 4, has a length of 1166 nucleotides.

[0804] APOE single strands and duplexes were made using routine methods known in the art. A detailed list of the unmodified APOE sense and antisense strand sequences is shown in Tables 2 and 4 and a detailed list of the modified APOE sense and antisense strand sequences is shown in Tables 3 and 5.

[0805] Table 7 provides a detailed list of the unmodified APOE sense and antisense strand sequences of those agents in Table 2 that target the pathogenic APOE4 allele and Table 8 provides a detailed list of the modified APOE sense and antisense strand sequences of those agents in Table 3 that target the pathogenic APOE4 allele.

siRNA Synthesis

[0806] siRNAs were synthesized and annealed using routine methods known in the art. Briefly, siRNA sequences were synthesized on a 1 μmol scale using a Mermade 192 synthesizer (BioAutomation) with phosphoramidite chemistry on solid supports. The solid support was controlled pore glass (500-1000 Å) loaded with a custom GalNAc ligand (3′-GalNAc conjugates), universal solid support (AM Chemicals), or the first nucleotide of interest. Ancillary synthesis reagents and standard 2-cyanoethyl phosphoramidite monomers (2′-deoxy-2′-fluoro, 2′-O-methyl, RNA, DNA) were obtained from Thermo-Fisher (Milwaukee, Wis.), Hongene (China), or Chemgenes (Wilmington, Mass., USA). Additional phosphoramidite monomers were procured from commercial suppliers, prepared in-house, or procured using custom synthesis from various CMOs. Phosphoramidites were prepared at a concentration of 100 mM in either acetonitrile or 9:1 acetonitrile:DMF and were coupled using 5-Ethylthio-1H-tetrazole (ETT, 0.25 M in acetonitrile) with a reaction time of 400 s. Phosphorothioate linkages were generated using a 100 mM solution of 3-((Dimethylamino-methylidene) amino)-3H-1,2,4-dithiazole-3-thione (DDTT, obtained from Chemgenes (Wilmington, Mass., USA)) in anhydrous acetonitrile/pyridine (9:1 v/v). Oxidation time was 5 minutes. All sequences were synthesized with final removal of the DMT group (“DMT-Off”).

[0807] Upon completion of the solid phase synthesis, solid-supported oligoribonucleotides were treated with 300 μL of Methylamine (40% aqueous) at room temperature in 96 well plates for approximately 2 hours to afford cleavage from the solid support and subsequent removal of all additional base-labile protecting groups. For sequences containing any natural ribonucleotide linkages (2′-OH) protected with a tert-butyl dimethyl silyl (TBDMS) group, a second deprotection step was performed using TEA·3HF (triethylamine trihydrofluoride). To each oligonucleotide solution in aqueous methylamine was added 200 μL of dimethyl sulfoxide (DMSO) and 300 μL TEA·3HF and the solution was incubated for approximately 30 mins at 60° C. After incubation, the plate was allowed to come to room temperature and crude oligonucleotides were precipitated by the addition of 1 mL of 9:1 acetontrile:ethanol or 1:1 ethanol:isopropanol. The plates were then centrifuged at 4° C. for 45 mins and the supernatant carefully decanted with the aid of a multichannel pipette. The oligonucleotide pellet was resuspended in 20 mM NaOAc and subsequently desalted using a HiTrap size exclusion column (5 mL, GE Healthcare) on an Agilent LC system equipped with an autosampler, UV detector, conductivity meter, and fraction collector. Desalted samples were collected in 96 well plates and then analyzed by LC-MS and UV spectrometry to confirm identity and quantify the amount of material, respectively.

[0808] Duplexing of single strands was performed on a Tecan liquid handling robot. Sense and antisense single strands were combined in an equimolar ratio to a final concentration of 10 μM in 1×PBS in 96 well plates, the plate sealed, incubated at 100° C. for 10 minutes, and subsequently allowed to return slowly to room temperature over a period of 2-3 hours. The concentration and identity of each duplex was confirmed and then subsequently utilized for in vitro screening assays.

### Cell Culture and Transfections

[0809] Cells were transfected by adding 4.9 μL of Opti-MEM plus 0.1 μL of RNAiMAX per well (Invitrogen, Carlsbad Calif. cat #13778-150) to 5 μL of siRNA duplexes per well, with 4 replicates of each siRNA duplex, into a 96-well plate, and incubated at room temperature for 15 minutes. Forty μL of MEDIA containing ˜1.5×10⁴ cells were then added to the siRNA mixture. Cells were incubated for 24 hours prior to RNA purification. Experiments were performed at 10 nM. Transfection experiments are performed in human hepatoma Hep3B cells (ATCC HB-8064) with EMEM (ATCC catalog no. 30-2003).

Total RNA Isolation Using DYNABEADS mRNA Isolation Kit

[0810] RNA was isolated using an automated protocol on a BioTek-EL406 platform using DYNABEADs (Invitrogen, cat #61012). Briefly, 70 μL of Lysis/Binding Buffer and 10 μL of lysis buffer containing 3 μL of magnetic beads were added to the plate with cells. Plates were incubated on an electromagnetic shaker for 10 minutes at room temperature and then magnetic beads were captured and the supernatant was removed. Bead-bound RNA were then washed 2 times with 150 μL Wash Buffer A and once with Wash Buffer B. Beads were then washed with 150 μL Elution Buffer, re-captured and supernatant removed.

cDNA Synthesis Using ABI High Capacity cDNA Reverse Transcription Kit (Applied Biosystems, Foster City, Calif., Cat #4368813)

[0811] Ten μL of a master mix containing 1 μL 10× Buffer, 0.4 μL 25× dNTPs, 1 μL 10× Random primers, 0.5 μL Reverse Transcriptase, 0.5 μL RNase inhibitor and 6.6 μL of H₂O per reaction was added to RNA isolated above. Plates were sealed, mixed, and incubated on an electromagnetic shaker for 10 minutes at room temperature, followed by 2 hour incubation at 37° C.

### Real Time PCR

[0812] Two μL of cDNA were added to a master mix containing 0.5 μL of human or mouse GAPDH TaqMan Probe (ThermoFisher cat 4352934E or 4351309) and 0.5 μL of appropriate APOE probe (commercially available, e.g., from Thermo Fisher) and 5 μL Lightcycler 480 probe master mix (Roche Cat #04887301001) per well in a 384 well plates (Roche cat #04887301001). Real time PCR was done in a LightCycler480 Real Time PCR system (Roche). Each duplex was tested with N=4 and data were normalized to cells transfected with a non-targeting control siRNA. To calculate relative fold change, real time data were analyzed using the ΔΔCt method and normalized to assays performed with cells transfected with a non-targeting control siRNA.

[0813] The results of a single dose screen in Hep3B cells with the agents in Table 5 are provided in Table 6.

TABLE 1
Abbreviations of nucleotide monomers used in nucleic acid sequence representation. It will
be understood that these monomers, when present in an oligonucleotide, are mutually linked by 5′-3′-
phosphodiester bonds; and it is understood that when the nucleotide contains a 2′-fluoro modification,
then the fluoro replaces the hydroxy at that position in the parent nucleotide (i.e., it is a 2′-deoxy-2′-
fluoronucleotide).

| Abbreviation | Nucleotide(s) |
|---|---|
| A | Adenosine-3′-phosphate |
| Ab | beta-L-adenosine-3′-phosphate |
| Abs | beta-L-adenosine-3'-phosphorothioate |
| Af | 2′-fluoroadenosine-3′-phosphate |
| Afs | 2′-fluoroadenosine-3′-phosphorothioate |
| As | adenosine-3′-phosphorothioate |
| C | cytidine-3′-phosphate |
| Cb | beta-L-cytidine-3′-phosphate |
| Cbs | beta-L-cytidine-3′-phosphorothioate |
| Cf | 2′-fluorocytidine-3′-phosphate |
| Cfs | 2′-fluorocytidine-3′-phosphorothioate |
| Cs | cytidine-3′-phosphorothioate |
| G | guanosine-3′-phosphate |
| Gb | beta-L-guanosine-3′-phosphate |
| Gbs | beta-L-guanosine-3′-phosphorothioate |
| Gf | 2′-fluoroguanosine-3′-phosphate |
| Gfs | 2′-fluoroguanosine-3′-phosphorothioate |
| Gs | guanosine-3′-phosphorothioate |
| T | 5′-methyluridine-3′-phosphate |
| Tf | 2′-fluoro-5-methyluridine-3′-phosphate |
| Tfs | 2′-fluoro-5-methyluridine-3′-phosphorothioate |
| Ts | 5-methyluridine-3′-phosphorothioate |
| U | Uridine-3′-phosphate |
| Uf | 2′-fluorouridine-3′-phosphate |
| Ufs | 2′-fluorouridine-3′-phosphorothioate |
| Us | uridine-3′-phosphorothioate |
| N | any nucleotide, modified or unmodified |
| a | 2′-O-methyladenosine-3′-phosphate |
| as | 2′-O-methyladenosine-3′-phosphorothioate |
| c | 2′-O-methylcytidine-3′-phosphate |
| cs | 2′-O-methylcytidine-3′-phosphorothioate |
| g | 2′-O-methylguanosine-3′-phosphate |
| gs | 2′-O-methylguanosine-3′-phosphorothioate |
| t | 2′-O-methyl-5-methyluridine-3′-phosphate |
| ts | 2′-O-methyl-5-methyluridine-3′-phosphorothioate |
| u | 2′-O-methyluridine-3′-phosphate |
| us | 2′-O-methyluridine-3′-phosphorothioate |
| s | phosphorothioate linkage |
| L96 | N-[tris(GalNAc-alkyl)-amidodecanoyl)]-4-hydroxyprolinol |
| | Hyp-(GalNAc-alkyl)3 |
| | [chemical structure] |
| Y34 | 2-hydroxymethyl-tetrahydrofurane-4-methoxy-3-phosphate (abasic 2′-OMe |
| | furanose) |
| Y44 | inverted abasic DNA (2-hydroxymethyl-tetrahydrofurane-5-phosphate) |
| (Agn) | Adenosine-glycol nucleic acid (GNA) |
| (Cgn) | Cytidine-glycol nucleic acid (GNA) |
| (Ggn) | Guanosine-glycol nucleic acid (GNA) |
| (Tgn) | Thymidine-glycol nucleic acid (GNA) S-Isomer |
| P | Phosphate |
| VP | Vinyl-phosphonate |
| (Aam) | 2′-O-(N-methylacetamide)adenosine-3′-phosphate |
| (Aams) | 2′-O-(N-methylacetamide)adenosine-3′-phosphorothioate |
| (Gam) | 2′-O-(N-methylacetamide)guanosine-3′-phosphate |
| (Gams) | 2′-O-(N-methylacetamide)guanosine-3′-phosphorothioate |
| (Tam) | 2′-O-(N-methylacetamide)thymidine-3′-phosphate |
| (Tams) | 2′-O-(N-methylacetamide)thymidine-3′-phosphorothioate |
| dA | 2′-deoxyadenosine-3′-phosphate |
| dAs | 2′-deoxyadenosine-3′-phosphorothioate |
| dC | 2′-deoxycytidine-3′-phosphate |
| dCs | 2′-deoxycytidine-3′-phosphorothioate |
| dG | 2′-deoxyguanosine-3′-phosphate |
| dGs | 2′-deoxyguanosine-3′-phosphorothioate |
| dT | 2′-deoxythymidine-3′-phosphate |
| dTs | 2′-deoxythymidine-3′-phosphorothioate |
| dU | 2′-deoxyuridine |
| dUs | 2′-deoxyuridine-3′-phosphorothioate |
| (Aeo) | 2′-O-methoxyethyladenosine-3′-phosphate |
| (Aeos) | 2′-O-methoxyethyladenosine-3′-phosphorothioate |
| (Geo) | 2′-O-methoxyethylguanosine-3′-phosphate |
| (Geos) | 2′-O-methoxyethylguanosine-3′-phosphorothioate |
| (Teo) | 2′-O-methoxyethyl-5-methyluridine-3′-phosphate |
| (Teos) | 2′-O-methoxyethyl-5-methyluridine-3′-phosphorothioate |
| (m5Ceo) | 2′-O-methoxyethyl-5-methylcytidine-3′-phosphate |
| (m5Ceos) | 2′-O-methoxyethyl-5-methylcytidine-3′-phosphorothioate |
| (A3m) | 3′-O-methyladenosine-2′-phosphate |
| (A3mx) | 3′-O-methyl-xylofuranosyladenosine-2′-phosphate |
| (G3m) | 3′-O-methylguanosine-2′-phosphate |
| (G3mx) | 3′-O-methyl-xylofuranosylguanosine-2′-phosphate |
| (C3m) | 3′-O-methylcytidine-2′-phosphate |
| (C3mx) | 3′-O-methyl-xylofuranosylcytidine-2′-phosphate |
| (U3m) | 3′-O-methyluridine-2′-phosphate |
| U3mx) | 3′-O-methyl-xylofuranosyluridine-2′-phosphate |
| (m5Cam) | 2′-O-(N-methylacetamide)-5-methylcytidine-3′-phosphate |
| (m5Cams) | 2′-O-(N-methylacetamide)-5-methylcytidine-3′-phosphorothioate |
| (Chd) | 2′-O-hexadecyl-cytidine-3′-phosphate |
| (Chds) | 2′-O-hexadecyl-cytidine-3′-phosphorothioate |
| (Uhd) | 2′-O-hexadecyl-uridine-3′-phosphate |
| (Uhds) | 2′-O-hexadecyl-uridine-3′-phosphorothioate |
| (pshe) | Hydroxyethylphosphorothioate |

TABLE 2
APOE Unmodified Sense and Antisense Strand Sequences

| | SEQ | | SEQ | Sense Strand | Antisense Strand |
|---|---|---|---|---|---|
| Sense Sequence | ID | Antisense Sequence | ID | Target Site in | Target Site in |
| 5′ to 3′ | NO: | 5′ to 3′ | NO: | NM_000041.4 | NM_000041.4 |
| GGCCAAUCACAGGCAGGAAGU | 15 | ACUUCCUGCCUGUGAUUGGCCAG | 150 | NM_000041.4_50- | NM_000041.4_48- |
| | | | | 70_A21U_s | 70_U1A_as |
| CAGGCAGGAAGAUGAAGGUUU | 16 | AAACCUUCAUCUUCCUGCCUGUG | 151 | NM_000041.4_59- | NM_000041.4_57- |
| | | | | 79_C21U_s | 79_G1A_as |
| AGGAAGAUGAAGGUUCUGUGU | 17 | ACACAGAACCUUCAUCUUCCUGC | 152 | NM_000041.4_64- | NM_000041.4_62- |
| | | | | 84_G21U_s | 84_C1A_as |
| AUGAAGGUUCUGUGGGCUGCU | 18 | AGCAGCCCACAGAACCUUCAUCU | 153 | NM_000041.4_70- | NM_000041.4_68- |
| | | | | 90_G21U_s | 90_C1A_as |
| UUCUGUGGGCUGCGUUGCUGU | 19 | ACAGCAACGCAGCCCACAGAACC | 154 | NM_000041.4_77- | NM_000041.4_75- |
| | | | | 97_G21U_s | 97_C1A_as |
| UGGGCUGCGUUGCUGGUCACU | 20 | AGUGACCAGCAACGCAGCCCACA | 155 | NM_000041.4_82- | NM_000041.4_80- |
| | | | | 102_A21U_s | 102_U1A_as |
| GCGUUGCUGGUCACAUUCCUU | 21 | AAGGAAUGUGACCAGCAACGCAG | 156 | NM_000041.4_88- | NM_000041.4_86- |
| | | | | 108_G21U_s | 108_C1A_as |
| GCUGGUCACAUUCCUGGCAGU | 22 | ACUGCCAGGAAUGUGACCAGCAA | 157 | NM_000041.4_93- | NM_000041.4_91- |
| | | | | 113_G21U_s | 113_C1A_as |
| UCACAUUCCUGGCAGGAUGCU | 23 | AGCAUCCUGCCAGGAAUGUGACC | 158 | NM_000041.4_98- | NM_000041.4_96- |
| | | | | 118_C21U_s | 118_G1A_as |
| UGGCAGGAUGCCAGGCCAAGU | 24 | ACUUGGCCUGGCAUCCUGCCAGG | 159 | NM_000041.4_107- | NM_000041.4_105- |
| | | | | 127_G21U_s | 127_C1A_as |
| CAGGCCAAGGUGGAGCAAGCU | 25 | AGCUUGCUCCACCUUGGCCUGGC | 160 | NM_000041.4_118- | NM_000041.4_116- |
| | | | | 138_G21U_s | 138_C1A_as |
| AAGGUGGAGCAAGCGGUGGAU | 26 | AUCCACCGCUUGCUCCACCUUGG | 161 | NM_000041.4_124- | NM_000041.4_122- |
| | | | | 144_G21U_s | 144_C1A_as |
| CAAGCGGUGGAGACAGAGCCU | 27 | AGGCUCUGUCUCCACCGCUUGCU | 162 | NM_000041.4_133- | NM_000041.4_131- |
| | | | | 153_G21U_s | 153_C1A_as |
| GGUGGAGACAGAGCCGGAGCU | 28 | AGCUCCGGCUCUGUCUCCACCGC | 163 | NM_000041.4_138- | NM_000041.4_136- |
| | | | | 158_C21U_s | 158_G1A_as |
| CCCGAGCUGCGCCAGCAGACU | 29 | AGUCUGCUGGCGCAGCUCGGGCU | 164 | NM_000041.4_157- | NM_000041.4_155- |
| | | | | 177_C21U_s | 177_G1A_as |
| GCUGCGCCAGCAGACCGAGUU | 30 | AACUCGGUCUGCUGGCGCAGCUC | 165 | NM_000041.4_162- | NM_000041.4_160- |
| | | | | 182_G21U_s | 182_C1A_as |
| CCAGCAGACCGAGUGGCAGAU | 31 | AUCUGCCACUCGGUCUGCUGGCG | 166 | NM_000041.4_168- | NM_000041.4_166- |
| | | | | 188_G21U_s | 188_C1A_as |
| CAGCGCUGGGAACUGGCACUU | 32 | AAGUGCCAGUUCCCAGCGCUGGC | 167 | NM_000041.4_193- | NM_000041.4_191- |
| | | | | 213_G21U_s | 213_C1A_as |
| CUGGGAACUGGCACUGGGUCU | 33 | AGACCCAGUGCCAGUUCCCAGCG | 168 | NM_000041.4_198- | NM_000041.4_196- |
| | | | | 218_G21U_s | 218_C1A_as |
| AACUGGCACUGGGUCGCUUUU | 34 | AAAAGCGACCCAGUGCCAGUUCC | 169 | NM_000041.4_203- | NM_000041.4_201- |
| | | | | 223_s | 223_as |
| CACUGGGUCGCUUUUGGGAUU | 35 | AAUCCCAAAAGCGACCCAGUGCC | 170 | NM_000041.4_209- | NM_000041.4_207- |
| | | | | 229_s | 229_as |
| GUCGCUUUUGGGAUUACCUGU | 36 | ACAGGUAAUCCCAAAAGCGACCC | 171 | NM_000041.4_215- | NM_000041.4_213- |
| | | | | 235_C21U_s | 235_G1A_as |
| UUUUGGGAUUACCUGCGCUGU | 37 | ACAGCGCAGGUAAUCCCAAAAGC | 172 | NM_000041.4_220- | NM_000041.4_218- |
| | | | | 240_G21U_s | 240_C1A_as |
| CUGCGCUGGGUGCAGACACUU | 38 | AAGUGUCUGCACCCAGCGCAGGU | 173 | NM_000041.4_232- | NM_000041.4_230- |
| | | | | 252_G21U_s | 252_C1A_as |
| UGGGUGCAGACACUGUCUGAU | 39 | AUCAGACAGUGUCUGCACCCAGC | 174 | NM_000041.4_238- | NM_000041.4_236- |
| | | | | 258_G21U_s | 258_C1A_as |
| CAGACACUGUCUGAGCAGGUU | 40 | AACCUGCUCAGACAGUGUCUGCA | 175 | NM_000041.4_244- | NM_000041.4_242- |
| | | | | 264_G21U_s | 264_C1A_as |
| CAGGAGGAGCUGCUCAGCUCU | 41 | AGAGCUGAGCAGCUCCUCCUGCA | 176 | NM_000041.4_265- | NM_000041.4_263- |
| | | | | 285_C21U_s | 285_G1A_as |
| CUGCUCAGCUCCCAGGUCACU | 42 | AGUGACCUGGGAGCUGAGCAGCU | 177 | NM_000041.4_274- | NM_000041.4_272- |
| | | | | 294_C21U_s | 294_G1A_as |
| UCCCAGGUCACCCAGGAACUU | 43 | AAGUUCCUGGGUGACCUGGGAGC | 178 | NM_000041.4_283- | NM_000041.4_281- |
| | | | | 303_G21U_s | 303_C1A_as |
| ACCCAGGAACUGAGGGCGCUU | 44 | AAGCGCCCUCAGUUCCUGGGUGA | 179 | NM_000041.4_292- | NM_000041.4_290- |
| | | | | 312_G21U_s | 312_C1A_as |
| UGAGGGCGCUGAUGGACGAGU | 45 | ACUCGUCCAUCAGCGCCCUCAGU | 180 | NM_000041.4_302- | NM_000041.4_300- |
| | | | | 322_A21U_s | 322_U1A_as |
| GCGCUGAUGGACGAGACCAUU | 46 | AAUGGUCUCGUCCAUCAGCGCCC | 181 | NM_000041.4_307- | NM_000041.4_305- |
| | | | | 327_G21U_s | 327_C1A_as |
| GACGAGACCAUGAAGGAGUUU | 47 | AAACUCCUUCAUGGUCUCGUCCA | 182 | NM_000041.4_316- | NM_000041.4_314- |
| | | | | 336_G21U_s | 336_C1A_as |
| ACCAUGAAGGAGUUGAAGGCU | 48 | AGCCUUCAACUCCUUCAUGGUCU | 183 | NM_000041.4_322- | NM_000041.4_320- |
| | | | | 342_C21U_s | 342_G1A_as |
| GGAGUUGAAGGCCUACAAAUU | 49 | AAUUUGUAGGCCUUCAACUCCUU | 184 | NM_000041.4_330- | NM_000041.4_328- |
| | | | | 350_C21U_s | 350_G1A_as |
| AAGGCCUACAAAUCGGAACUU | 50 | AAGUUCCGAUUUGUAGGCCUUCA | 185 | NM_000041.4_337- | NM_000041.4_335- |
| | | | | 357_G21U_s | 357_C1A_as |
| ACAAAUCGGAACUGGAGGAAU | 51 | AUUCCUCCAGUUCCGAUUUGUAG | 186 | NM_000041.4_344- | NM_000041.4_342- |
| | | | | 364_C21U_s | 364_G1A_as |
| UCGGAACUGGAGGAACAACUU | 52 | AAGUUGUUCCUCCAGUUCCGAUU | 187 | NM_000041.4_349- | NM_000041.4_347- |
| | | | | 369_G21U_s | 369_C1A_as |
| GAGGAACAACUGACCCCGGUU | 53 | AACCGGGGUCAGUUGUUCCUCCA | 188 | NM_000041.4_358- | NM_000041.4_356- |
| | | | | 378_G21U_s | 378_C1A_as |
| CGCGGGCACGGCUGUCCAAGU | 54 | ACUUGGACAGCCGUGCCCGCGUC | 189 | NM_000041.4_389- | NM_000041.4_387- |
| | | | | 409_G21U_s | 409_C1A_as |
| GCACGGCUGUCCAAGGAGCUU | 55 | AAGCUCCUUGGACAGCCGUGCCC | 190 | NM_000041.4_394- | NM_000041.4_392- |
| | | | | 414_G21U_s | 414_C1A_as |
| GCUGUCCAAGGAGCUGCAGGU | 56 | ACCUGCAGCUCCUUGGACAGCCG | 191 | NM_000041.4_399- | NM_000041.4_397- |
| | | | | 419_C21U_s | 419_G1A_as |
| GCCCGGCUGGGCGCGGACAUU | 57 | AAUGUCCGCGCCCAGCCGGGCCU | 192 | NM_000041.4_427- | NM_000041.4_425- |
| | | | | 447_G21U_s | 447_C1A_as |
| CUGGGCGCGGACAUGGAGGAU | 58 | AUCCUCCAUGUCCGCGCCCAGCC | 193 | NM_000041.4_433- | NM_000041.4_431- |
| | | | | 453_C21U_s | 453_G1A_as |
| CGCGGACAUGGAGGACGUGCU | 59 | AGCACGUCCUCCAUGUCCGCGCC | 194 | NM_000041.4_438- | NM_000041.4_436- |
| | | | | 458_U20C_G21U_s | 458_C1A_A2G_as |
| GCGGACAUGGAGGACGUGUGU | 60 | ACACACGUCCUCCAUGUCCGCGC | 195 | NM_000041.4_439- | NM_000041.4_437- |
| | | | | 459_C21U_s | 459_G1A_as |
| GCGGACAUGGAGGACGUGCGU | 61 | ACGCACGUCCUCCAUGUCCGCGC | 196 | NM_000041.4_439- | NM_000041.4_437- |
| | | | | 459_U19C_C21U_s | 459_G1A_A3G_as |
| CGGACAUGGAGGACGUGCGCU | 62 | AGCGCACGUCCUCCAUGUCCGCG | 197 | NM_000041.4_440- | NM_000041.4_438- |
| | | | | 460_U18C_G21U_s | 460_C1A_A4G_as |
| GGACAUGGAGGACGUGCGCGU | 63 | ACGCGCACGUCCUCCAUGUCCGC | 198 | NM_000041.4_441- | NM_000041.4_439- |
| | | | | 461_U17C_G21U_s | 461_C1A_A5G_as |
| GACAUGGAGGACGUGCGCGGU | 64 | ACCGCGCACGUCCUCCAUGUCCG | 199 | NM_000041.4_442- | NM_000041.4_440- |
| | | | | 462_U16C_C21U_s | 462_G1A_A6G_as |
| ACAUGGAGGACGUGCGCGGCU | 65 | AGCCGCGCACGUCCUCCAUGUCC | 200 | NM_000041.4_443- | NM_000041.4_441- |
| | | | | 463_U15C_C21U_s | 463_G1A_A7G_as |
| CAUGGAGGACGUGCGCGGCCU | 66 | AGGCCGCGCACGUCCUCCAUGUC | 201 | NM_000041.4_444- | NM_000041.4_442- |
| | | | | 464_U14C_G21U_s | 464_C1A_A8G_as |
| AUGGAGGACGUGCGCGGCCGU | 67 | ACGGCCGCGCACGUCCUCCAUGU | 202 | NM_000041.4_445- | NM_000041.4_443- |
| | | | | 465_U13C_C21U_s | 465_G1A_A9G_as |
| UGGAGGACGUGCGCGGCCGCU | 68 | AGCGGCCGCGCACGUCCUCCAUG | 203 | NM_000041.4_446- | NM_000041.4_444- |
| | | | | 466_U12C_C21U_s | 466_G1A_A10G_as |
| GGAGGACGUGCGCGGCCGCCU | 69 | AGGCGGCCGCGCACGUCCUCCAU | 204 | NM_000041.4_447- | NM_000041.4_445- |
| | | | | 467_UHC_s | 467_A11G_as |
| GAGGACGUGCGCGGCCGCCUU | 70 | AAGGCGGCCGCGCACGUCCUCCA | 205 | NM_000041.4_448- | NM_000041.4_446- |
| | | | | 468_U10C_G21U_s | 468_C1A_A12G_as |
| AGGACGUGCGCGGCCGCCUGU | 71 | ACAGGCGGCCGCGCACGUCCUCC | 206 | NM_000041.4_449- | NM_000041.4_447- |
| | | | | 469_U9C_G21U_s | 469_C1A_A13G_as |
| GGACGUGCGCGGCCGCCUGGU | 72 | ACCAGGCGGCCGCGCACGUCCUC | 207 | NM_000041.4_450- | NM_000041.4_448- |
| | | | | 470_U8C_s | 470_A14G_as |
| GACGUGCGCGGCCGCCUGGUU | 73 | AACCAGGCGGCCGCGCACGUCCU | 208 | NM_000041.4_451- | NM_000041.4_449- |
| | | | | 471_U7C_G21U_s | 471_C1A_A15G_as |
| ACGUGCGCGGCCGCCUGGUGU | 74 | ACACCAGGCGGCCGCGCACGUCC | 209 | NM_000041.4_452- | NM_000041.4_450- |
| | | | | 472_U6C_C21U_s | 472_G1A_A16G_as |
| CGUGCGCGGCCGCCUGGUGCU | 75 | AGCACCAGGCGGCCGCGCACGUC | 210 | NM_000041.4_453- | NM_000041.4_451- |
| | | | | 473_U5C_A21U_s | 473_U1A_A17G_as |
| GUGCGCGGCCGCCUGGUGCAU | 76 | AUGCACCAGGCGGCCGCGCACGU | 211 | NM_000041.4_454- | NM_000041.4_452- |
| | | | | 474_U4C_G21U_s | 474_C1A_A18G_as |
| GCGGCCGCCUGGUGCAGUACU | 77 | AGUACUGCACCAGGCGGCCGCAC | 212 | NM_000041.4_458- | NM_000041.4_456- |
| | | | | 478_C21U_s | 478_G1A_as |
| CGCCUGGUGCAGUACCGCGGU | 78 | ACCGCGGUACUGCACCAGGCGGC | 213 | NM_000041.4_463- | NM_000041.4_461- |
| | | | | 483_C21U_s | 483_G1A_as |
| GAGGUGCAGGCCAUGCUCGGU | 79 | ACCGAGCAUGGCCUGCACCUCGC | 214 | NM_000041.4_484- | NM_000041.4_482- |
| | | | | 504_C21U_s | 504_G1A_as |
| GCCAUGCUCGGCCAGAGCACU | 80 | AGUGCUCUGGCCGAGCAUGGCCU | 215 | NM_000041.4_493- | NM_000041.4_491- |
| | | | | 513_C21U_s | 513_G1A_as |
| GGCCAGAGCACCGAGGAGCUU | 81 | AAGCUCCUCGGUGCUCUGGCCGA | 216 | NM_000041.4_502- | NM_000041.4_500- |
| | | | | 522_G21U_s | 522_C1A_as |
| GCUGCGGGUGCGCCUCGCCUU | 82 | AAGGCGAGGCGCACCCGCAGCUC | 217 | NM_000041.4_519- | NM_000041.4_517- |
| | | | | 539_C21U_s | 539_G1A_as |
| GUGCGCCUCGCCUCCCACCUU | 83 | AAGGUGGGAGGCGAGGCGCACCC | 218 | NM_000041.4_526- | NM_000041.4_524- |
| | | | | 546_G21U_s | 546_C1A_as |
| CGCCUCCCACCUGCGCAAGCU | 84 | AGCUUGCGCAGGUGGGAGGCGAG | 219 | NM_000041.4_534- | NM_000041.4_532- |
| | | | | 554_s | 554_as |
| CCCACCUGCGCAAGCUGCGUU | 85 | AACGCAGCUUGCGCAGGUGGGAG | 220 | NM_000041.4_539- | NM_000041.4_537- |
| | | | | 559_A21U_s | 559_U1A_as |
| CUGCGCAAGCUGCGUAAGCGU | 86 | ACGCUUACGCAGCUUGCGCAGGU | 221 | NM_000041.4_544- | NM_000041.4_542- |
| | | | | 564_G21U_s | 564_C1A_as |
| AAGCUGCGUAAGCGGCUCCUU | 87 | AAGGAGCCGCUUACGCAGCUUGC | 222 | NM_000041.4_550- | NM_000041.4_548- |
| | | | | 570_C21U_s | 570_G1A_as |
| GUAAGCGGCUCCUCCGCGAUU | 88 | AAUCGCGGAGGAGCCGCUUACGC | 223 | NM_000041.4_557- | NM_000041.4_555- |
| | | | | 577_G21U_s | 577_C1A_as |
| GGCUCCUCCGCGAUGCCGAUU | 89 | AAUCGGCAUCGCGGAGGAGCCGC | 224 | NM_000041.4_563- | NM_000041.4_561- |
| | | | | 583_G21U_s | 583_C1A_as |
| CUCCGCGAUGCCGAUGACCUU | 90 | AAGGUCAUCGGCAUCGCGGAGGA | 225 | NM_000041.4_568- | NM_000041.4_566- |
| | | | | 588_G21U_s | 588_C1A_as |
| GAUGCCGAUGACCUGCAGAAU | 91 | AUUCUGCAGGUCAUCGGCAUCGC | 226 | NM_000041.4_574- | NM_000041.4_572- |
| | | | | 594_G21U_s | 594_C1A_as |
| GAUGACCUGCAGAAGCGCCUU | 92 | AAGGCGCUUCUGCAGGUCAUCGG | 227 | NM_000041.4_580- | NM_000041.4_578- |
| | | | | 600_G21U_s | 600_C1A_as |
| CUGCAGAAGCGCCUGGCAGUU | 93 | AACUGCCAGGCGCUUCUGCAGGU | 228 | NM_000041.4_586- | NM_000041.4_584- |
| | | | | 606_G21U_s | 606_C1A_as |
| AAGCGCCUGGCAGUGUACCAU | 94 | AUGGUACACUGCCAGGCGCUUCU | 229 | NM_000041.4_592- | NM_000041.4_590- |
| | | | | 612_G21U_s | 612_C1A_as |
| CUGGCAGUGUACCAGGCCGGU | 95 | ACCGGCCUGGUACACUGCCAGGC | 230 | NM_000041.4_598- | NM_000041.4_596- |
| | | | | 618_G21U_s | 618_C1A_as |
| GAGCGCGGCCUCAGCGCCAUU | 96 | AAUGGCGCUGAGGCCGCGCUCGG | 231 | NM_000041.4_634- | NM_000041.4_632- |
| | | | | 654_C21U_s | 654_G1A_as |
| CGGCCUCAGCGCCAUCCGCGU | 97 | ACGCGGAUGGCGCUGAGGCCGCG | 232 | NM_000041.4_639- | NM_000041.4_637- |
| | | | | 659_A21U_s | 659_U1A_as |
| AGCGCCAUCCGCGAGCGCCUU | 98 | AAGGCGCUCGCGGAUGGCGCUGA | 233 | NM_000041.4_646- | NM_000041.4_644- |
| | | | | 666_G21U_s | 666_C1A_as |
| UGGGGCCCCUGGUGGAACAGU | 99 | ACUGUUCCACCAGGGGCCCCAGG | 234 | NM_000041.4_665- | NM_000041.4_663- |
| | | | | 685_G21U_s | 685_C1A_as |
| CCCCUGGUGGAACAGGGCCGU | 100 | ACGGCCCUGUUCCACCAGGGGCC | 235 | NM_000041.4_670- | NM_000041.4_668- |
| | | | | 690_C21U_s | 690_G1A_as |
| CGCGUGCGGGCCGCCACUGUU | 101 | AACAGUGGCGGCCCGCACGCGGC | 236 | NM_000041.4_688- | NM_000041.4_686- |
| | | | | 708_G21U_s | 708_C1A_as |
| GCCGCCACUGUGGGCUCCCUU | 102 | AAGGGAGCCCACAGUGGCGGCCC | 237 | NM_000041.4_697- | NM_000041.4_695- |
| | | | | 717_G21U_s | 717_C1A_as |
| CCUGGCCGGCCAGCCGCUACU | 103 | AGUAGCGGCUGGCCGGCCAGGGA | 238 | NM_000041.4_714- | NM_000041.4_712- |
| | | | | 734_A21U_s | 734_U1A_as |
| GGCCAGCCGCUACAGGAGCGU | 104 | ACGCUCCUGUAGCGGCUGGCCGG | 239 | NM_000041.4_721- | NM_000041.4_719- |
| | | | | 741_G21U_s | 741_C1A_as |
| GCCGCUACAGGAGCGGGCCCU | 105 | AGGGCCCGCUCCUGUAGCGGCUG | 240 | NM_000041.4_726- | NM_000041.4_724- |
| | | | | 746_A21U_s | 746_U1A_as |
| GCGCGGAUGGAGGAGAUGGGU | 106 | ACCCAUCUCCUCCAUCCGCGCGC | 241 | NM_000041.4_769- | NM_000041.4_767- |
| | | | | 789_C21U_s | 789_G1A_as |
| CGCGACCGCCUGGACGAGGUU | 107 | AACCUCGUCCAGGCGGUCGCGGG | 242 | NM_000041.4_799- | NM_000041.4_797- |
| | | | | 819_G21U_s | 819_C1A_as |
| GCCUGGACGAGGUGAAGGAGU | 108 | ACUCCUUCACCUCGUCCAGGCGG | 243 | NM_000041.4_806- | NM_000041.4_804- |
| | | | | 826_C21U_s | 826_G1A_as |
| GACGAGGUGAAGGAGCAGGUU | 109 | AACCUGCUCCUUCACCUCGUCCA | 244 | NM_000041.4_811- | NM_000041.4_809- |
| | | | | 831_G21U_s | 831_C1A_as |
| GGAGGUGCGCGCCAAGCUGGU | 110 | ACCAGCUUGGCGCGCACCUCCGC | 245 | NM_000041.4_834- | NM_000041.4_832- |
| | | | | 854_A21U_s | 854_U1A_as |
| CGCGCCAAGCUGGAGGAGCAU | 111 | AUGCUCCUCCAGCUUGGCGCGCA | 246 | NM_000041.4_841- | NM_000041.4_839- |
| | | | | 861_G21U_s | 861_C1A_as |
| CAGGCCCAGCAGAUACGCCUU | 112 | AAGGCGUAUCUGCUGGGCCUGCU | 247 | NM_000041.4_859- | NM_000041.4_857- |
| | | | | 879_G21U_s | 879_C1A_as |
| CCAGCAGAUACGCCUGCAGGU | 113 | ACCUGCAGGCGUAUCUGCUGGGC | 248 | NM_000041.4_864- | NM_000041.4_862- |
| | | | | 884_C21U_s | 884_G1A_as |
| CGCCUGCAGGCCGAGGCCUUU | 114 | AAAGGCCUCGGCCUGCAGGCGUA | 249 | NM_000041.4_874- | NM_000041.4_872- |
| | | | | 894_C21U_s | 894_G1A_as |
| GCAGGCCGAGGCCUUCCAGGU | 115 | ACCUGGAAGGCCUCGGCCUGCAG | 250 | NM_000041.4_879- | NM_000041.4_877- |
| | | | | 899_C21U_s | 899_G1A_as |
| CCGAGGCCUUCCAGGCCCGCU | 116 | AGCGGGCCUGGAAGGCCUCGGCC | 251 | NM_000041.4_884- | NM_000041.4_882- |
| | | | | 904_C21U_s | 904_G1A_as |
| GCCUUCCAGGCCCGCCUCAAU | 117 | AUUGAGGCGGGCCUGGAAGGCCU | 252 | NM_000041.4_889- | NM_000041.4_887- |
| | | | | 909_G21U_s | 909_C1A_as |
| CCAGGCCCGCCUCAAGAGCUU | 118 | AAGCUCUUGAGGCGGGCCUGGAA | 253 | NM_000041.4_894- | NM_000041.4_892- |
| | | | | 914_G21U_s | 914_C1A_as |
| CCGCCUCAAGAGCUGGUUCGU | 119 | ACGAACCAGCUCUUGAGGCGGGC | 254 | NM_000041.4_900- | NM_000041.4_898- |
| | | | | 920_A21U_s | 920_U1A_as |
| CAAGAGCUGGUUCGAGCCCCU | 120 | AGGGGCUCGAACCAGCUCUUGAG | 255 | NM_000041.4_906- | NM_000041.4_904- |
| | | | | 926_s | 926_as |
| AGCCCCUGGUGGAAGACAUGU | 121 | ACAUGUCUUCCACCAGGGGCUCG | 256 | NM_000041.4_920- | NM_000041.4_918- |
| | | | | 940_C21U_s | 940_G1A_as |
| CUGGUGGAAGACAUGCAGCGU | 122 | ACGCUGCAUGUCUUCCACCAGGG | 257 | NM_000041.4_925- | NM_000041.4_923- |
| | | | | 945_C21U_s | 945_G1A_as |
| GGAAGACAUGCAGCGCCAGUU | 123 | AACUGGCGCUGCAUGUCUUCCAC | 258 | NM_000041.4_930- | NM_000041.4_928- |
| | | | | 950_G21U_s | 950_C1A_as |
| GCCGGGCUGGUGGAGAAGGUU | 124 | AACCUUCUCCACCAGCCCGGCCC | 259 | NM_000041.4_952- | NM_000041.4_950- |
| | | | | 972_G21U_s | 972_C1A_as |
| GCUGGUGGAGAAGGUGCAGGU | 125 | ACCUGCACCUUCUCCACCAGCCC | 260 | NM_000041.4_957- | NM_000041.4_955- |
| | | | | 977_C21U_s | 977_G1A_as |
| ACCAGCGCCGCCCCUGUGCCU | 126 | AGGCACAGGGGCGGCGCUGGUGC | 261 | NM_000041.4_988- | NM_000041.4_986- |
| | | | | 1008_C21U_s | 1008_G1A_as |
| GCCCCUGUGCCCAGCGACAAU | 127 | AUUGUCGCUGGGCACAGGGGCGG | 262 | NM_000041.4_997- | NM_000041.4_995- |
| | | | | 1017_s | 1017_as |
| UGUGCCCAGCGACAAUCACUU | 128 | AAGUGAUUGUCGCUGGGCACAGG | 263 | NM_000041.4_1002- | NM_000041.4_1000- |
| | | | | 1022_G21U_s | 1022_C1A_as |
| CAGCGACAAUCACUGAACGCU | 129 | AGCGUUCAGUGAUUGUCGCUGGG | 264 | NM_000041.4_1008- | NM_000041.4_1006- |
| | | | | 1028_C21U_s | 1028_G1A_as |
| CAAUCACUGAACGCCGAAGCU | 130 | AGCUUCGGCGUUCAGUGAUUGUC | 265 | NM_000041.4_1014- | NM_000041.4_1012- |
| | | | | 1034_C21U_s | 1034_G1A_as |
| ACUGAACGCCGAAGCCUGCAU | 131 | AUGCAGGCUUCGGCGUUCAGUGA | 266 | NM_000041.4_1019- | NM_000041.4_1017- |
| | | | | 1039_G21U_s | 1039_C1A_as |
| ACGCCGAAGCCUGCAGCCAUU | 132 | AAUGGCUGCAGGCUUCGGCGUUC | 267 | NM_000041.4_1024- | NM_000041.4_1022- |
| | | | | 1044_G21U_s | 1044_C1A_as |
| GAAGCCUGCAGCCAUGCGACU | 133 | AGUCGCAUGGCUGCAGGCUUCGG | 268 | NM_000041.4_1029- | NM_000041.4_1027- |
| | | | | 1049_C21U_s | 1049_G1A_as |
| UGCAGCCAUGCGACCCCACGU | 134 | ACGUGGGGUCGCAUGGCUGCAGG | 269 | NM_000041.4_1035- | NM_000041.4_1033- |
| | | | | 1055_C21U_s | 1055_G1A_as |
| GCGACCCCACGCCACCCCGUU | 135 | AACGGGGUGGCGUGGGGUCGCAU | 270 | NM_000041.4_1044- | NM_000041.4_1042- |
| | | | | 1064_G21U_s | 1064_C1A_as |
| CCCACGCCACCCCGUGCCUCU | 136 | AGAGGCACGGGGUGGCGUGGGGU | 271 | NM_000041.4_1049- | NM_000041.4_1047- |
| | | | | 1069_C21U_s | 1069_G1A_as |
| CCACCCCGUGCCUCCUGCCUU | 137 | AAGGCAGGAGGCACGGGGUGGCG | 272 | NM_000041.4_1055- | NM_000041.4_1053- |
| | | | | 1075_C21U_s | 1075_G1A_as |
| CGUGCCUCCUGCCUCCGCGCU | 138 | AGCGCGGAGGCAGGAGGCACGGG | 273 | NM_000041.4_1061- | NM_000041.4_1059- |
| | | | | 1081_A21U_s | 1081_U1A_as |
| CUCCUGCCUCCGCGCAGCCUU | 139 | AAGGCUGCGCGGAGGCAGGAGGC | 274 | NM_000041.4_1066- | NM_000041.4_1064- |
| | | | | 1086_G21U_s | 1086_C1A_as |
| GCCUCCGCGCAGCCUGCAGCU | 140 | AGCUGCAGGCUGCGCGGAGGCAG | 275 | NM_000041.4_1071- | NM_000041.4_1069- |
| | | | | 1091_G21U_s | 1091_C1A_as |
| CCUGUCCCCGCCCCAGCCGUU | 141 | AACGGCUGGGGCGGGGACAGGGU | 276 | NM_000041.4_1098- | NM_000041.4_1096- |
| | | | | 1118_C21U_s | 1118_G1A_as |
| CCCGCCCCAGCCGUCCUCCUU | 142 | AAGGAGGACGGCUGGGGCGGGGA | 277 | NM_000041.4_1104- | NM_000041.4_1102- |
| | | | | 1124_G21U_s | 1124_C1A_as |
| CCCAGCCGUCCUCCUGGGGUU | 143 | AACCCCAGGAGGACGGCUGGGGC | 278 | NM_000041.4_1109- | NM_000041.4_1107- |
| | | | | 1129_G21U_s | 1129_C1A_as |
| UCCUGGGGUGGACCCUAGUUU | 144 | AAACUAGGGUCCACCCCAGGAGG | 279 | NM_000041.4_1120- | NM_000041.4_1118- |
| | | | | 1140_s | 1140_as |
| GGGUGGACCCUAGUUUAAUAU | 145 | AUAUUAAACUAGGGUCCACCCCA | 280 | NM_000041.4_1125- | NM_000041.4_1123- |
| | | | | 1145_A21U_s | 1145_U1A_as |
| GACCCUAGUUUAAUAAAGAUU | 146 | AAUCUUUAUUAAACUAGGGUCCA | 281 | NM_000041.4_1130- | NM_000041.4_1128- |
| | | | | 1150_s | 1150_as |
| UAGUUUAAUAAAGAUUCACCU | 147 | AGGUGAAUCUUUAUUAAACUAGG | 282 | NM_000041.4_1135- | NM_000041.4_1133- |
| | | | | 1155_A21U_s | 1155_U1A_as |
| UAAUAAAGAUUCACCAAGUUU | 148 | AAACUUGGUGAAUCUUUAUUAAA | 283 | NM_000041.4_1140- | NM_000041.4_1138- |
| | | | | 1160_s | 1160_as |
| AGAUUCACCAAGUUUCACGCU | 149 | AGCGUGAAACUUGGUGAAUCUUU | 284 | NM_000041.4_1146- | NM_000041.4_1144- |
| | | | | 1166_A21U_s | 1166_U1A_as |

TABLE 3
APOE Modified Sense and Antisense Strand Sequences

| | SEQ | | SEQ | | SEQ |
|---|---|---|---|---|---|
| Sense Sequence | ID | Antisense Sequence | ID | mRNA Target Sequence | ID |
| 5′ to 3′ | NO: | 5′to 3′ | NO: | 5′ to 3′ | NO: |
| gsgsccaaUfcAfCfAfggcaggaaguL96 | 285 | asCfsuucCfuGfCfcuguGfaUfuggccsasg | 420 | CTGGCCAATCACAGGCAGGAAGA | 555 |
| csasggcaGfgAfAfGfaugaagguuuL96 | 286 | asAfsaccUfuCfAfucuuCfcUfgccugsusg | 421 | CACAGGCAGGAAGATGAAGGTTC | 556 |
| asgsgaagAfuGfAfAfgguucuguguL96 | 287 | asCfsacaGfaAfCfcuucAfuCfuuccusgsc | 422 | GCAGGAAGATGAAGGTTCTGTGG | 557 |
| asusgaagGfuUfCfUfgugggcugcuL96 | 288 | asGfscagCfcCfAfcagaAfcCfuucauscsu | 423 | AGATGAAGGTTCTGTGGGCTGCG | 558 |
| ususcuguGfgGfCfUfgcguugcuguL96 | 289 | asCfsagcAfaCfGfcagcCfcAfcagaascsc | 424 | GGTTCTGTGGGCTGCGTTGCTGG | 559 |
| usgsggcuGfcGfUfUfgcuggucacuL96 | 290 | asGfsugaCfcAfGfcaacGfcAfgcccascsa | 425 | TGTGGGCTGCGTTGCTGGTCACA | 560 |
| gscsguugCfuGfGfUfcacauuccuuL96 | 291 | asAfsggaAfuGfUfgaccAfgCfaacgcsasg | 426 | CTGCGTTGCTGGTCACATTCCTG | 561 |
| gscsugguCfaCfAfUfuccuggcaguL96 | 292 | asCfsugcCfaGfGfaaugUfgAfccagcsasa | 427 | TTGCTGGTCACATTCCTGGCAGG | 562 |
| uscsacauUfcCfUfGfgcaggaugcuL96 | 293 | asGfscauCfcUfGfccagGfaAfugugascsc | 428 | GGTCACATTCCTGGCAGGATGCC | 563 |
| usgsgcagGfaUfGfCfcaggccaaguL96 | 294 | asCfsuugGfcCfUfggcaUfcCfugccasgsg | 429 | CCTGGCAGGATGCCAGGCCAAGG | 564 |
| csasggccAfaGfGfUfggagcaagcuL96 | 295 | asGfscuuGfcUfCfcaccUfuGfgccugsgsc | 430 | GCCAGGCCAAGGTGGAGCAAGCG | 565 |
| asasggugGfaGfCfAfagcgguggauL96 | 296 | asUfsccaCfcGfCfuugcUfcCfaccuusgsg | 431 | CCAAGGTGGAGCAAGCGGTGGAG | 566 |
| csasagcgGfuGfGfAfgacagagccuL96 | 297 | asGfsgcuCfuGfUfcuccAfcCfgcuugscsu | 432 | AGCAAGCGGTGGAGACAGAGCCG | 567 |
| gsgsuggaGfaCfAfGfagccggagcuL96 | 298 | asGfscucCfgGfCfucugUfcUfccaccsgsc | 433 | GCGGTGGAGACAGAGCCGGAGCC | 568 |
| cscscgagCfuGfCfGfccagcagacuL96 | 299 | asGfsucuGfcUfGfgcgcAfgCfucgggscsu | 434 | AGCCCGAGCTGCGCCAGCAGACC | 569 |
| gscsugcgCfcAfGfCfagaccgaguuL96 | 300 | asAfscucGfgUfCfugcuGfgCfgcagcsusc | 435 | GAGCTGCGCCAGCAGACCGAGTG | 570 |
| cscsagcaGfaCfCfGfaguggcagauL96 | 301 | asUfscugCfcAfCfucggUfcUfgcuggscsg | 436 | CGCCAGCAGACCGAGTGGCAGAG | 571 |
| csasgcgcUfgGfGfAfacuggcacuuL96 | 302 | asAfsgugCfcAfGfuuccCfaGfcgcugsgsc | 437 | GCCAGCGCTGGGAACTGGCACTG | 572 |
| csusgggaAfcUfGfGfcacugggucuL96 | 303 | asGfsaccCfaGfUfgccaGfuUfcccagscsg | 438 | CGCTGGGAACTGGCACTGGGTCG | 573 |
| asascuggCfaCfUfGfggucgcuuuuL96 | 304 | asAfsaagCfgAfCfccagUfgCfcaguuscsc | 439 | GGAACTGGCACTGGGTCGCTTTT | 574 |
| csascuggGfuCfGfCfuuuugggauuL96 | 305 | asAfsuccCfaAfAfagcgAfcCfcagugscsc | 440 | GGCACTGGGTCGCTTTTGGGATT | 575 |
| gsuscgcuUfuUfGfGfgauuaccuguL96 | 306 | asCfsaggUfaAfUfcccaAfaAfgcgacscsc | 441 | GGGTCGCTTTTGGGATTACCTGC | 576 |
| ususuuggGfaUfUfAfccugcgcuguL96 | 307 | asCfsagcGfcAfGfguaaUfcCfcaaaasgsc | 442 | GCTTTTGGGATTACCTGCGCTGG | 577 |
| csusgcgcUfgGfGfUfgcagacacuuL96 | 308 | asAfsgugUfcUfGfcaccCfaGfcgcagsgsu | 443 | ACCTGCGCTGGGTGCAGACACTG | 578 |
| usgsggugCfaGfAfCfacugucugauL96 | 309 | asUfscagAfcAfGfugucUfgCfacccasgsc | 444 | GCTGGGTGCAGACACTGTCTGAG | 579 |
| csasgacaCfuGfUfCfugagcagguuL96 | 310 | asAfsccuGfcUfCfagacAfgUfgucugscsa | 445 | TGCAGACACTGTCTGAGCAGGTG | 580 |
| csasggagGfaGfCfUfgcucagcucuL96 | 311 | asGfsagcUfgAfGfcagcUfcCfuccugscsa | 446 | TGCAGGAGGAGCTGCTCAGCTCC | 581 |
| csusgcucAfgCfUfCfccaggucacuL96 | 312 | asGfsugaCfcUfGfggagCfuGfagcagscsu | 447 | AGCTGCTCAGCTCCCAGGTCACC | 582 |
| uscsccagGfuCfAfCfccaggaacuuL96 | 313 | asAfsguuCfcUfGfggugAfcCfugggasgsc | 448 | GCTCCCAGGTCACCCAGGAACTG | 583 |
| ascsccagGfaAfCfUfgagggcgcuuL96 | 314 | asAfsgcgCfcCfUfcaguUfcCfugggusgsa | 449 | TCACCCAGGAACTGAGGGCGCTG | 584 |
| usgsagggCfgCfUfGfauggacgaguL96 | 315 | asCfsucgUfcCfAfucagCfgCfccucasgsu | 450 | ACTGAGGGCGCTGATGGACGAGA | 585 |
| gscsgcugAfuGfGfAfcgagaccauuL96 | 316 | asAfsuggUfcUfCfguccAfuCfagcgcscsc | 451 | GGGCGCTGATGGACGAGACCATG | 586 |
| gsascgagAfcCfAfUfgaaggaguuuL96 | 317 | asAfsacuCfcUfUfcaugGfuCfucgucscsa | 452 | TGGACGAGACCATGAAGGAGTTG | 587 |
| ascscaugAfaGfGfAfguugaaggcuL96 | 318 | asGfsccuUfcAfAfcuccUfuCfaugguscsu | 453 | AGACCATGAAGGAGTTGAAGGCC | 588 |
| gsgsaguuGfaAfGfGfccuacaaauuL96 | 319 | asAfsuuuGfuAfGfgccuUfcAfacuccsusu | 454 | AAGGAGTTGAAGGCCTACAAATC | 589 |
| asasggccUfaCfAfAfaucggaacuuL96 | 320 | asAfsguuCfcGfAfuuugUfaGfgccuuscsa | 455 | TGAAGGCCTACAAATCGGAACTG | 590 |
| ascsaaauCfgGfAfAfcuggaggaauL96 | 321 | asUfsuccUfcCfAfguucCfgAfuuugusasg | 456 | CTACAAATCGGAACTGGAGGAAC | 591 |
| uscsggaaCfuGfGfAfggaacaacuuL96 | 322 | asAfsguuGfuUfCfcuccAfgUfuccgasusu | 457 | AATCGGAACTGGAGGAACAACTG | 592 |
| gsasggaaCfaAfCfUfgaccccgguuL96 | 323 | asAfsccgGfgGfUfcaguUfgUfuccucscsa | 458 | TGGAGGAACAACTGACCCCGGTG | 593 |
| csgscgggCfaCfGfGfcuguccaaguL96 | 324 | asCfsuugGfaCfAfgccgUfgCfccgcgsusc | 459 | GACGCGGGCACGGCTGTCCAAGG | 594 |
| gscsacggCfuGfUfCfcaaggagcuuL96 | 325 | asAfsgcuCfcUfUfggacAfgCfcgugcscsc | 460 | GGGCACGGCTGTCCAAGGAGCTG | 595 |
| gscsugucCfaAfGfGfagcugcagguL96 | 326 | asCfscugCfaGfCfuccuUfgGfacagcscsg | 461 | CGGCTGTCCAAGGAGCTGCAGGC | 596 |
| gscsccggCfuGfGfGfcgcggacauuL96 | 327 | asAfsuguCfcGfCfgcccAfgCfcgggcscsu | 462 | AGGCCCGGCTGGGCGCGGACATG | 597 |
| csusgggcGfcGfGfAfcauggaggauL96 | 328 | asUfsccuCfcAfUfguccGfcGfcccagscsc | 463 | GGCTGGGCGCGGACATGGAGGAC | 598 |
| csgscggaCfaUfGfGfaggacgugcuL96 | 329 | asGfscacGfuCfCfuccaUfgUfccgcgscsc | 464 | GGCGCGGACATGGAGGACGTGCG | 599 |
| gscsggacAfuGfGfAfggacguguguL96 | 330 | asCfsacaCfgUfCfcuccAfuGfuccgcsgsc | 465 | GCGCGGACATGGAGGACGTGTGC | 600 |
| gscsggacAfuGfGfAfggacgugcguL96 | 331 | asCfsgcaCfgUfCfcuccAfuGfuccgcsgsc | 466 | GCGCGGACATGGAGGACGTGCGC | 601 |
| csgsgacaUfgGfAfGfgacgugcgcuL96 | 332 | asGfscgcAfcGfUfccucCfaUfguccgscsg | 467 | CGCGGACATGGAGGACGTGCGCG | 602 |
| gsgsacauGfgAfGfGfacgugcgcguL96 | 333 | asCfsgcgCfaCfGfuccuCfcAfuguccsgsc | 468 | GCGGACATGGAGGACGTGCGCGG | 603 |
| gsascaugGfaGfGfAfcgugcgcgguL96 | 334 | asCfscgcGfcAfCfguccUfcCfaugucscsg | 469 | CGGACATGGAGGACGTGCGCGGC | 604 |
| ascsauggAfgGfAfCfgugcgcggcuL96 | 335 | asGfsccgCfgCfAfcgucCfuCfcauguscsc | 470 | GGACATGGAGGACGTGCGCGGCC | 605 |
| csasuggaGfgAfCfGfugcgcggccuL96 | 336 | asGfsgccGfcGfCfacguCfcUfccaugsusc | 471 | GACATGGAGGACGTGCGCGGCCG | 606 |
| asusggagGfaCfGfUfgcgcggccguL96 | 337 | asCfsggcCfgCfGfcacgUfcCfuccausgsu | 472 | ACATGGAGGACGTGCGCGGCCGC | 607 |
| usgsgaggAfcGfUfGfcgcggccgcuL96 | 338 | asGfscggCfcGfCfgcacGfuCfcuccasusg | 473 | CATGGAGGACGTGCGCGGCCGCC | 608 |
| gsgsaggaCfgUfGfCfgcggccgccuL96 | 339 | asGfsgcgGfcCfGfcgcaCfgUfccuccsasu | 474 | ATGGAGGACGTGCGCGGCCGCCT | 609 |
| gsasggacGfuGfCfGfcggccgccuuL96 | 340 | asAfsggcGfgCfCfgcgcAfcGfuccucscsa | 475 | TGGAGGACGTGCGCGGCCGCCTG | 610 |
| asgsgacgUfgCfGfCfggccgccuguL96 | 341 | asCfsaggCfgGfCfcgcgCfaCfguccuscsc | 476 | GGAGGACGTGCGCGGCCGCCTGG | 611 |
| gsgsacguGfcGfCfGfgccgccugguL96 | 342 | asCfscagGfcGfGfccgcGfcAfcguccsusc | 477 | GAGGACGTGCGCGGCCGCCTGGT | 612 |
| gsascgugCfgCfGfGfccgccugguuL96 | 343 | asAfsccaGfgCfGfgccgCfgCfacgucscsu | 478 | AGGACGTGCGCGGCCGCCTGGTG | 613 |
| ascsgugcGfcGfGfCfcgccugguguL96 | 344 | asCfsaccAfgGfCfggccGfcGfcacguscsc | 479 | GGACGTGCGCGGCCGCCTGGTGC | 614 |
| csgsugcgCfgGfCfCfgccuggugcuL96 | 345 | asGfscacCfaGfGfcggcCfgCfgcacgsusc | 480 | GACGTGCGCGGCCGCCTGGTGCA | 615 |
| gsusgcgcGfgCfCfGfccuggugcauL96 | 346 | asUfsgcaCfcAfGfgcggCfcGfcgcacsgsu | 481 | ACGTGCGCGGCCGCCTGGTGCAG | 616 |
| gscsggccGfcCfUfGfgugcaguacuL96 | 347 | asGfsuacUfgCfAfccagGfcGfgccgcsasc | 482 | GTGCGGCCGCCTGGTGCAGTACC | 617 |
| csgsccugGfuGfCfAfguaccgcgguL96 | 348 | asCfscgcGfgUfAfcugcAfcCfaggcgsgsc | 483 | GCCGCCTGGTGCAGTACCGCGGC | 618 |
| gsasggugCfaGfGfCfcaugcucgguL96 | 349 | asCfscgaGfcAfUfggccUfgCfaccucsgsc | 484 | GCGAGGTGCAGGCCATGCTCGGC | 619 |
| gscscaugCfuCfGfGfccagagcacuL96 | 350 | asGfsugcUfcUfGfgccgAfgCfauggcscsu | 485 | AGGCCATGCTCGGCCAGAGCACC | 620 |
| gsgsccagAfgCfAfCfcgaggagcuuL96 | 351 | asAfsgcuCfcUfCfggugCfuCfuggccsgsa | 486 | TCGGCCAGAGCACCGAGGAGCTG | 621 |
| gscsugcgGfgUfGfCfgccucgccuuL96 | 352 | asAfsggcGfaGfGfcgcaCfcCfgcagcsusc | 487 | GAGCTGCGGGTGCGCCTCGCCTC | 622 |
| gsusgcgcCfuCfGfCfcucccaccuuL96 | 353 | asAfsgguGfgGfAfggcgAfgGfcgcacscsc | 488 | GGGTGCGCCTCGCCTCCCACCTG | 623 |
| csgsccucCfcAfCfCfugcgcaagcuL96 | 354 | asGfscuuGfcGfCfagguGfgGfaggcgsasg | 489 | CTCGCCTCCCACCTGCGCAAGCT | 624 |
| cscscaccUfgCfGfCfaagcugcguuL96 | 355 | asAfscgcAfgCfUfugcgCfaGfgugggsasg | 490 | CTCCCACCTGCGCAAGCTGCGTA | 625 |
| csusgcgcAfaGfCfUfgcguaagcguL96 | 356 | asCfsgcuUfaCfGfcagcUfuGfcgcagsgsu | 491 | ACCTGCGCAAGCTGCGTAAGCGG | 626 |
| asasgcugCfgUfAfAfgcggcuccuuL96 | 357 | asAfsggaGfcCfGfcuuaCfgCfagcuusgsc | 492 | GCAAGCTGCGTAAGCGGCTCCTC | 627 |
| gsusaagcGfgCfUfCfcuccgcgauuL96 | 358 | asAfsucgCfgGfAfggagCfcGfcuuacsgsc | 493 | GCGTAAGCGGCTCCTCCGCGATG | 628 |
| gsgscuccUfcCfGfCfgaugccgauuL96 | 359 | asAfsucgGfcAfUfcgcgGfaGfgagccsgsc | 494 | GCGGCTCCTCCGCGATGCCGATG | 629 |
| csusccgcGfaUfGfCfcgaugaccuuL96 | 360 | asAfsgguCfaUfCfggcaUfcGfcggagsgsa | 495 | TCCTCCGCGATGCCGATGACCTG | 630 |
| gsasugccGfaUfGfAfccugcagaauL96 | 361 | asUfsucuGfcAfGfgucaUfcGfgcaucsgsc | 496 | GCGATGCCGATGACCTGCAGAAG | 631 |
| gsasugacCfuGfCfAfgaagcgccuuL96 | 362 | asAfsggcGfcUfUfcugcAfgGfucaucsgsg | 497 | CCGATGACCTGCAGAAGCGCCTG | 632 |
| csusgcagAfaGfCfGfccuggcaguuL96 | 363 | asAfscugCfcAfGfgcgcUfuCfugcagsgsu | 498 | ACCTGCAGAAGCGCCTGGCAGTG | 633 |
| asasgcgcCfuGfGfCfaguguaccauL96 | 364 | asUfsgguAfcAfCfugccAfgGfcgcuuscsu | 499 | AGAAGCGCCTGGCAGTGTACCAG | 634 |
| csusggcaGfuGfUfAfccaggccgguL96 | 365 | asCfscggCfcUfGfguacAfcUfgccagsgsc | 500 | GCCTGGCAGTGTACCAGGCCGGG | 635 |
| gsasgcgcGfgCfCfUfcagcgccauuL96 | 366 | asAfsuggCfgCfUfgaggCfcGfcgcucsgsg | 501 | CCGAGCGCGGCCTCAGCGCCATC | 636 |
| csgsgccuCfaGfCfGfccauccgcguL96 | 367 | asCfsgcgGfaUfGfgcgcUfgAfggccgscsg | 502 | CGCGGCCTCAGCGCCATCCGCGA | 637 |
| asgscgccAfuCfCfGfcgagcgccuuL96 | 368 | asAfsggcGfcUfCfgcggAfuGfgcgcusgsa | 503 | TCAGCGCCATCCGCGAGCGCCTG | 638 |
| usgsgggcCfcCfUfGfguggaacaguL96 | 369 | asCfsuguUfcCfAfccagGfgGfccccasgsg | 504 | CCTGGGGCCCCTGGTGGAACAGG | 639 |
| cscsccugGfuGfGfAfacagggccguL96 | 370 | asCfsggcCfcUfGfuuccAfcCfaggggscsc | 505 | GGCCCCTGGTGGAACAGGGCCGC | 640 |
| csgscgugCfgGfGfCfcgccacuguuL96 | 371 | asAfscagUfgGfCfggccCfgCfacgcgsgsc | 506 | GCCGCGTGCGGGCCGCCACTGTG | 641 |
| gscscgccAfcUfGfUfgggcucccuuL96 | 372 | asAfsgggAfgCfCfcacaGfuGfgcggcscsc | 507 | GGGCCGCCACTGTGGGCTCCCTG | 642 |
| cscsuggcCfgGfCfCfagccgcuacuL96 | 373 | asGfsuagCfgGfCfuggcCfgGfccaggsgsa | 508 | TCCCTGGCCGGCCAGCCGCTACA | 643 |
| gsgsccagCfcGfCfUfacaggagcguL96 | 374 | asCfsgcuCfcUfGfuagcGfgCfuggccsgsg | 509 | CCGGCCAGCCGCTACAGGAGCGG | 644 |
| gscscgcuAfcAfGfGfagcgggcccuL96 | 375 | asGfsggcCfcGfCfuccuGfuAfgcggcsusg | 510 | CAGCCGCTACAGGAGCGGGCCCA | 645 |
| gscsgcggAfuGfGfAfggagauggguL96 | 376 | asCfsccaUfcUfCfcuccAfuCfcgcgcsgsc | 511 | GCGCGCGGATGGAGGAGATGGGC | 646 |
| csgscgacCfgCfCfUfggacgagguuL96 | 377 | asAfsccuCfgUfCfcaggCfgGfucgcgsgsg | 512 | CCCGCGACCGCCTGGACGAGGTG | 647 |
| gscscuggAfcGfAfGfgugaaggaguL96 | 378 | asCfsuccUfuCfAfccucGfuCfcaggcsgsg | 513 | CCGCCTGGACGAGGTGAAGGAGC | 648 |
| gsascgagGfuGfAfAfggagcagguuL96 | 379 | asAfsccuGfcUfCfcuucAfcCfucgucscsa | 514 | TGGACGAGGTGAAGGAGCAGGTG | 649 |
| gsgsagguGfcGfCfGfccaagcugguL96 | 380 | asCfscagCfuUfGfgcgcGfcAfccuccsgsc | 515 | GCGGAGGTGCGCGCCAAGCTGGA | 650 |
| csgscgccAfaGfCfUfggaggagcauL96 | 381 | asUfsgcuCfcUfCfcagcUfuGfgcgcgscsa | 516 | TGCGCGCCAAGCTGGAGGAGCAG | 651 |
| csasggccCfaGfCfAfgauacgccuuL96 | 382 | asAfsggcGfuAfUfcugcUfgGfgccugscsu | 517 | AGCAGGCCCAGCAGATACGCCTG | 652 |
| cscsagcaGfaUfAfCfgccugcagguL96 | 383 | asCfscugCfaGfGfcguaUfcUfgcuggsgsc | 518 | GCCCAGCAGATACGCCTGCAGGC | 653 |
| csgsccugCfaGfGfCfcgaggccuuuL96 | 384 | asAfsaggCfcUfCfggccUfgCfaggcgsusa | 519 | TACGCCTGCAGGCCGAGGCCTTC | 654 |
| gscsaggcCfgAfGfGfccuuccagguL96 | 385 | asCfscugGfaAfGfgccuCfgGfccugcsasg | 520 | CTGCAGGCCGAGGCCTTCCAGGC | 655 |
| cscsgaggCfcUfUfCfcaggcccgcuL96 | 386 | asGfscggGfcCfUfggaaGfgCfcucggscsc | 521 | GGCCGAGGCCTTCCAGGCCCGCC | 656 |
| gscscuucCfaGfGfCfccgccucaauL96 | 387 | asUfsugaGfgCfGfggccUfgGfaaggcscsu | 522 | AGGCCTTCCAGGCCCGCCTCAAG | 657 |
| cscsaggcCfcGfCfCfucaagagcuuL96 | 388 | asAfsgcuCfuUfGfaggcGfgGfccuggsasa | 523 | TTCCAGGCCCGCCTCAAGAGCTG | 658 |
| cscsgccuCfaAfGfAfgcugguucguL96 | 389 | asCfsgaaCfcAfGfcucuUfgAfggcggsgsc | 524 | GCCCGCCTCAAGAGCTGGTTCGA | 659 |
| csasagagCfuGfGfUfucgagccccuL96 | 390 | asGfsgggCfuCfGfaaccAfgCfucuugsasg | 525 | CTCAAGAGCTGGTTCGAGCCCCT | 660 |
| asgsccccUfgGfUfGfgaagacauguL96 | 391 | asCfsaugUfcUfUfccacCfaGfgggcuscsg | 526 | CGAGCCCCTGGTGGAAGACATGC | 661 |
| csusggugGfaAfGfAfcaugcagcguL96 | 392 | asCfsgcuGfcAfUfgucuUfcCfaccagsgsg | 527 | CCCTGGTGGAAGACATGCAGCGC | 662 |
| gsgsaagaCfaUfGfCfagcgccaguuL96 | 393 | asAfscugGfcGfCfugcaUfgUfcuuccsasc | 528 | GTGGAAGACATGCAGCGCCAGTG | 663 |
| gscscgggCfuGfGfUfggagaagguuL96 | 394 | asAfsccuUfcUfCfcaccAfgCfccggcscsc | 529 | GGGCCGGGCTGGTGGAGAAGGTG | 664 |
| gscsugguGfgAfGfAfaggugcagguL96 | 395 | asCfscugCfaCfCfuucuCfcAfccagcscsc | 530 | GGGCTGGTGGAGAAGGTGCAGGC | 665 |
| ascscagcGfcCfGfCfcccugugccuL96 | 396 | asGfsgcaCfaGfGfggcgGfcGfcuggusgsc | 531 | GCACCAGCGCCGCCCCTGTGCCC | 666 |
| gscscccuGfuGfCfCfcagcgacaauL96 | 397 | asUfsuguCfgCfUfgggcAfcAfggggcsgsg | 532 | CCGCCCCTGTGCCCAGCGACAAT | 667 |
| usgsugccCfaGfCfGfacaaucacuuL96 | 398 | asAfsgugAfuUfGfucgcUfgGfgcacasgsg | 533 | CCTGTGCCCAGCGACAATCACTG | 668 |
| csasgcgaCfaAfUfCfacugaacgcuL96 | 399 | asGfscguUfcAfGfugauUfgUfcgcugsgsg | 534 | CCCAGCGACAATCACTGAACGCC | 669 |
| csasaucaCfuGfAfAfcgccgaagcuL96 | 400 | asGfscuuCfgGfCfguucAfgUfgauugsusc | 535 | GACAATCACTGAACGCCGAAGCC | 670 |
| ascsugaaCfgCfCfGfaagccugcauL96 | 401 | asUfsgcaGfgCfUfucggCfgUfucagusgsa | 536 | TCACTGAACGCCGAAGCCTGCAG | 671 |
| ascsgccgAfaGfCfCfugcagccauuL96 | 402 | asAfsuggCfuGfCfaggcUfuCfggcgususc | 537 | GAACGCCGAAGCCTGCAGCCATG | 672 |
| gsasagccUfgCfAfGfccaugcgacuL96 | 403 | asGfsucgCfaUfGfgcugCfaGfgcuucsgsg | 538 | CCGAAGCCTGCAGCCATGCGACC | 673 |
| usgscagcCfaUfGfCfgaccccacguL96 | 404 | asCfsgugGfgGfUfcgcaUfgGfcugcasgsg | 539 | CCTGCAGCCATGCGACCCCACGC | 674 |
| gscsgaccCfcAfCfGfccaccccguuL96 | 405 | asAfscggGfgUfGfgcguGfgGfgucgcsasu | 540 | ATGCGACCCCACGCCACCCCGTG | 675 |
| cscscacgCfcAfCfCfccgugccucuL96 | 406 | asGfsaggCfaCfGfggguGfgCfgugggsgsu | 541 | ACCCCACGCCACCCCGTGCCTCC | 676 |
| cscsacccCfgUfGfCfcuccugccuuL96 | 407 | asAfsggcAfgGfAfggcaCfgGfgguggscsg | 542 | CGCCACCCCGTGCCTCCTGCCTC | 677 |
| csgsugccUfcCfUfGfccuccgcgcuL96 | 408 | asGfscgcGfgAfGfgcagGfaGfgcacgsgsg | 543 | CCCGTGCCTCCTGCCTCCGCGCA | 678 |
| csusccugCfcUfCfCfgcgcagccuuL96 | 409 | asAfsggcUfgCfGfcggaGfgCfaggagsgsc | 544 | GCCTCCTGCCTCCGCGCAGCCTG | 679 |
| gscscuccGfcGfCfAfgccugcagcuL96 | 410 | asGfscugCfaGfGfcugcGfcGfgaggcsasg | 545 | CTGCCTCCGCGCAGCCTGCAGCG | 680 |
| cscsugucCfcCfGfCfcccagccguuL96 | 411 | asAfscggCfuGfGfggcgGfgGfacaggsgsu | 546 | ACCCTGTCCCCGCCCCAGCCGTC | 681 |
| cscscgccCfcAfGfCfcguccuccuuL96 | 412 | asAfsggaGfgAfCfggcuGfgGfgcgggsgsa | 547 | TCCCCGCCCCAGCCGTCCTCCTG | 682 |
| cscscagcCfgUfCfCfuccugggguuL96 | 413 | asAfscccCfaGfGfaggaCfgGfcugggsgsc | 548 | GCCCCAGCCGTCCTCCTGGGGTG | 683 |
| uscscuggGfgUfGfGfacccuaguuuL96 | 414 | asAfsacuAfgGfGfuccaCfcCfcaggasgsg | 549 | CCTCCTGGGGTGGACCCTAGTTT | 684 |
| gsgsguggAfcCfCfUfaguuuaauauL96 | 415 | asUfsauuAfaAfCfuaggGfuCfcacccscsa | 550 | TGGGGTGGACCCTAGTTTAATAA | 685 |
| gsascccuAfgUfUfUfaauaaagauuL96 | 416 | asAfsucuUfuAfUfuaaaCfuAfgggucscsa | 551 | TGGACCCTAGTTTAATAAAGATT | 686 |
| usasguuuAfaUfAfAfagauucaccuL96 | 417 | asGfsgugAfaUfCfuuuaUfuAfaacuasgsg | 552 | CCTAGTTTAATAAAGATTCACCA | 687 |
| usasauaaAfgAfUfUfcaccaaguuuL96 | 418 | asAfsacuUfgGfUfgaauCfuUfuauuasasa | 553 | TTTAATAAAGATTCACCAAGTTT | 688 |
| asgsauucAfcCfAfAfguuucacgcuL96 | 419 | asGfscguGfaAfAfcuugGfuGfaaucususu | 554 | AAAGATTCACCAAGTTTCACGCA | 689 |

TABLE 4
APOE Unmodified Sense and Antisense Strand Sequences

| | Sense Strand | SEQ ID | Antisense Strand | SEQ ID |
|---|---|---|---|---|
| Duplex ID | Sequence 5′ to 3′ | NO: | Sequence 5′ to 3′ | NO: |
| AD-1072375.1 | GGAGUUGAAGGCCUACAAAUU | 49 | AAUUUGUAGGCCUUCAACUCCUU | 184 |
| AD-1072352.1 | GCGCUGAUGGACGAGACCAUU | 46 | AAUGGUCUCGUCCAUCAGCGCCC | 181 |
| AD-1072394.1 | UCGGAACUGGAGGAACAACUU | 52 | AAGUUGUUCCUCCAGUUCCGAUU | 187 |
| AD-1072721.1 | ACGCCGAAGCCUGCAGCCAUU | 132 | AAUGGCUGCAGGCUUCGGCGUUC | 267 |
| AD-1072254.1 | CACUGGGUCGCUUUUGGGAUU | 35 | AAUCCCAAAAGCGACCCAGUGCC | 170 |
| AD-1072189.1 | AAGGUGGAGCAAGCGGUGGAU | 26 | AUCCACCGCUUGCUCCACCUUGG | 161 |
| AD-1072741.1 | GACCCUAGUUUAAUAAAGAUU | 146 | AAUCUUUAUUAAACUAGGGUCCA | 281 |
| AD-1072382.1 | AAGGCCUACAAAUCGGAACUU | 50 | AAGUUCCGAUUUGUAGGCCUUCA | 185 |
| AD-1072129.1 | AGGAAGAUGAAGGUUCUGUGU | 17 | ACACAGAACCUUCAUCUUCCUGC | 152 |
| AD-1072514.1 | CUCCGCGAUGCCGAUGACCUU | 90 | AAGGUCAUCGGCAUCGCGGAGGA | 225 |
| AD-1072124.1 | CAGGCAGGAAGAUGAAGGUUU | 16 | AAACCUUCAUCUUCCUGCCUGUG | 151 |
| AD-1072337.1 | ACCCAGGAACUGAGGGCGCUU | 44 | AAGCGCCCUCAGUUCCUGGGUGA | 179 |
| AD-1072135.1 | AUGAAGGUUCUGUGGGCUGCU | 18 | AGCAGCCCACAGAACCUUCAUCU | 153 |
| AD-1072745.1 | UAGUUUAAUAAAGAUUCACCU | 147 | AGGUGAAUCUUUAUUAAACUAGG | 282 |
| AD-1072153.1 | GCGUUGCUGGUCACAUUCCUU | 21 | AAGGAAUGUGACCAGCAACGCAG | 156 |
| AD-1072520.1 | GAUGCCGAUGACCUGCAGAAU | 91 | AUUCUGCAGGUCAUCGGCAUCGC | 226 |
| AD-1072389.1 | ACAAAUCGGAACUGGAGGAAU | 51 | AUUCCUCCAGUUCCGAUUUGUAG | 186 |
| AD-1072716.1 | ACUGAACGCCGAAGCCUGCAU | 131 | AUGCAGGCUUCGGCGUUCAGUGA | 266 |
| AD-1072222.1 | CCAGCAGACCGAGUGGCAGAU | 31 | AUCUGCCACUCGGUCUGCUGGCG | 166 |
| AD-1072367.1 | ACCAUGAAGGAGUUGAAGGCU | 48 | AGCCUUCAACUCCUUCAUGGUCU | 183 |
| AD-1103894.1 | AGAUUCACCAAGUUUCACGCU | 149 | AGCGUGAAACUUGGUGAAUCUUU | 284 |
| AD-1072651.1 | GCCUUCCAGGCCCGCCUCAAU | 117 | AUUGAGGCGGGCCUGGAAGGCCU | 252 |
| AD-1072260.1 | GUCGCUUUUGGGAUUACCUGU | 36 | ACAGGUAAUCCCAAAAGCGACCC | 171 |
| AD-1072265.1 | UUUUGGGAUUACCUGCGCUGU | 37 | ACAGCGCAGGUAAUCCCAAAAGC | 172 |
| AD-1072750.1 | UAAUAAAGAUUCACCAAGUUU | 148 | AAACUUGGUGAAUCUUUAUUAAA | 283 |
| AD-1072142.1 | UUCUGUGGGCUGCGUUGCUGU | 19 | ACAGCAACGCAGCCCACAGAACC | 154 |
| AD-1072328.1 | UCCCAGGUCACCCAGGAACUU | 43 | AAGUUCCUGGGUGACCUGGGAGC | 178 |
| AD-1072198.1 | CAAGCGGUGGAGACAGAGCCU | 27 | AGGCUCUGUCUCCACCGCUUGCU | 162 |
| AD-1072361.1 | GACGAGACCAUGAAGGAGUUU | 47 | AAACUCCUUCAUGGUCUCGUCCA | 182 |
| AD-1072526.1 | GAUGACCUGCAGAAGCGCCUU | 92 | AAGGCGCUUCUGCAGGUCAUCGG | 227 |
| AD-1072699.1 | UGUGCCCAGCGACAAUCACUU | 128 | AAGUGAUUGUCGCUGGGCACAGG | 263 |
| AD-1072711.1 | CAAUCACUGAACGCCGAAGCU | 130 | AGCUUCGGCGUUCAGUGAUUGUC | 265 |
| AD-1103879.1 | CAAGAGCUGGUUCGAGCCCCU | 120 | AGGGGCUCGAACCAGCUCUUGAG | 255 |
| AD-1103849.1 | GAGGAACAACUGACCCCGGUU | 53 | AACCGGGGUCAGUUGUUCCUCCA | 188 |
| AD-1072662.1 | CCGCCUCAAGAGCUGGUUCGU | 119 | ACGAACCAGCUCUUGAGGCGGGC | 254 |
| AD-1103883.1 | UGCAGCCAUGCGACCCCACGU | 134 | ACGUGGGGUCGCAUGGCUGCAGG | 269 |
| AD-1072172.1 | UGGCAGGAUGCCAGGCCAAGU | 24 | ACUUGGCCUGGCAUCCUGCCAGG | 159 |
| AD-1072158.1 | GCUGGUCACAUUCCUGGCAGU | 22 | ACUGCCAGGAAUGUGACCAGCAA | 157 |
| AD-1072705.1 | CAGCGACAAUCACUGAACGCU | 129 | AGCGUUCAGUGAUUGUCGCUGGG | 264 |
| AD-1072147.1 | UGGGCUGCGUUGCUGGUCACU | 20 | AGUGACCAGCAACGCAGCCCACA | 155 |
| AD-1072593.1 | GACGAGGUGAAGGAGCAGGUU | 109 | AACCUGCUCCUUCACCUCGUCCA | 244 |
| AD-1072115.1 | GGCCAAUCACAGGCAGGAAGU | 15 | ACUUCCUGCCUGUGAUUGGCCAG | 150 |
| AD-1072289.1 | CAGACACUGUCUGAGCAGGUU | 40 | AACCUGCUCAGACAGUGUCUGCA | 175 |
| AD-1072283.1 | UGGGUGCAGACACUGUCUGAU | 39 | AUCAGACAGUGUCUGCACCCAGC | 174 |
| AD-1103871.1 | CGGCCUCAGCGCCAUCCGCGU | 97 | ACGCGGAUGGCGCUGAGGCCGCG | 232 |
| AD-1072183.1 | CAGGCCAAGGUGGAGCAAGCU | 25 | AGCUUGCUCCACCUUGGCCUGGC | 160 |
| AD-1072667.1 | CUGGUGGAAGACAUGCAGCGU | 122 | ACGCUGCAUGUCUUCCACCAGGG | 257 |
| AD-1072614.1 | CGCGCCAAGCUGGAGGAGCAU | 111 | AUGCUCCUCCAGCUUGGCGCGCA | 246 |
| AD-1072632.1 | CAGGCCCAGCAGAUACGCCUU | 112 | AAGGCGUAUCUGCUGGGCCUGCU | 247 |
| AD-1072211.1 | CCCGAGCUGCGCCAGCAGACU | 29 | AGUCUGCUGGCGCAGCUCGGGCU | 164 |
| AD-1072406.1 | GCACGGCUGUCCAAGGAGCUU | 55 | AAGCUCCUUGGACAGCCGUGCCC | 190 |
| AD-1103882.1 | GCCCCUGUGCCCAGCGACAAU | 127 | AUUGUCGCUGGGCACAGGGGCGG | 262 |
| AD-1103855.1 | GACAUGGAGGACGUGCGCGGU | 64 | ACCGCGCACGUCCUCCAUGUCCG | 199 |
| AD-1072726.1 | GAAGCCUGCAGCCAUGCGACU | 133 | AGUCGCAUGGCUGCAGGCUUCGG | 268 |
| AD-1103893.1 | UCCUGGGGUGGACCCUAGUUU | 144 | AAACUAGGGUCCACCCCAGGAGG | 279 |
| AD-1072736.1 | GGGUGGACCCUAGUUUAAUAU | 145 | AUAUUAAACUAGGGUCCACCCCA | 280 |
| AD-1072426.1 | GCGGACAUGGAGGACGUGUGU | 60 | ACACACGUCCUCCAUGUCCGCGC | 195 |
| AD-1072506.1 | GUAAGCGGCUCCUCCGCGAUU | 88 | AAUCGCGGAGGAGCCGCUUACGC | 223 |
| AD-1072248.1 | AACUGGCACUGGGUCGCUUUU | 34 | AAAAGCGACCCAGUGCCAGUUCC | 169 |
| AD-1072203.1 | GGUGGAGACAGAGCCGGAGCU | 28 | AGCUCCGGCUCUGUCUCCACCGC | 163 |
| AD-1103888.1 | CUCCUGCCUCCGCGCAGCCUU | 139 | AAGGCUGCGCGGAGGCAGGAGGC | 274 |
| AD-1072243.1 | CUGGGAACUGGCACUGGGUCU | 33 | AGACCCAGUGCCAGUUCCCAGCG | 168 |
| AD-1103886.1 | CCACCCCGUGCCUCCUGCCUU | 137 | AAGGCAGGAGGCACGGGGUGGCG | 272 |
| AD-1072347.1 | UGAGGGCGCUGAUGGACGAGU | 45 | ACUCGUCCAUCAGCGCCCUCAGU | 180 |
| AD-1072411.1 | GCUGUCCAAGGAGCUGCAGGU | 56 | ACCUGCAGCUCCUUGGACAGCCG | 191 |
| AD-1072319.1 | CUGCUCAGCUCCCAGGUCACU | 42 | AGUGACCUGGGAGCUGAGCAGCU | 177 |
| AD-1103885.1 | CCCACGCCACCCCGUGCCUCU | 136 | AGAGGCACGGGGUGGCGUGGGGU | 271 |
| AD-1072488.1 | CCCACCUGCGCAAGCUGCGUU | 85 | AACGCAGCUUGCGCAGGUGGGAG | 220 |
| AD-1072532.1 | CUGCAGAAGCGCCUGGCAGUU | 93 | AACUGCCAGGCGCUUCUGCAGGU | 228 |
| AD-1072493.1 | CUGCGCAAGCUGCGUAAGCGU | 86 | ACGCUUACGCAGCUUGCGCAGGU | 221 |
| AD-1072686.1 | GCUGGUGGAGAAGGUGCAGGU | 125 | ACCUGCACCUUCUCCACCAGCCC | 260 |
| AD-1072656.1 | CCAGGCCCGCCUCAAGAGCUU | 118 | AAGCUCUUGAGGCGGGCCUGGAA | 253 |
| AD-1103851.1 | CGCGGACAUGGAGGACGUGCU | 59 | AGCACGUCCUCCAUGUCCGCGCC | 194 |
| AD-1072216.1 | GCUGCGCCAGCAGACCGAGUU | 30 | AACUCGGUCUGCUGGCGCAGCUC | 165 |
| AD-1072455.1 | GAGGUGCAGGCCAUGCUCGGU | 79 | ACCGAGCAUGGCCUGCACCUCGC | 214 |
| AD-1072581.1 | CGCGACCGCCUGGACGAGGUU | 107 | AACCUCGUCCAGGCGGUCGCGGG | 242 |
| AD-1072499.1 | AAGCUGCGUAAGCGGCUCCUU | 87 | AAGGAGCCGCUUACGCAGCUUGC | 222 |
| AD-1103854.1 | GGACAUGGAGGACGUGCGCGU | 63 | ACGCGCACGUCCUCCAUGUCCGC | 198 |
| AD-1072672.1 | GGAAGACAUGCAGCGCCAGUU | 123 | AACUGGCGCUGCAUGUCUUCCAC | 258 |
| AD-1072644.1 | CGCCUGCAGGCCGAGGCCUUU | 114 | AAAGGCCUCGGCCUGCAGGCGUA | 249 |
| AD-1103850.1 | GCCCGGCUGGGCGCGGACAUU | 57 | AAUGUCCGCGCCCAGCCGGGCCU | 192 |
| AD-1103875.1 | CGCGUGCGGGCCGCCACUGUU | 101 | AACAGUGGCGGCCCGCACGCGGC | 236 |
| AD-1072401.1 | CGCGGGCACGGCUGUCCAAGU | 54 | ACUUGGACAGCCGUGCCCGCGUC | 189 |
| AD-1072438.1 | CGCCUGGUGCAGUACCGCGGU | 78 | ACCGCGGUACUGCACCAGGCGGC | 213 |
| AD-1072310.1 | CAGGAGGAGCUGCUCAGCUCU | 41 | AGAGCUGAGCAGCUCCUCCUGCA | 176 |
| AD-1072277.1 | CUGCGCUGGGUGCAGACACUU | 38 | AAGUGUCUGCACCCAGCGCAGGU | 173 |
| AD-1103852.1 | GCGGACAUGGAGGACGUGCGU | 61 | ACGCACGUCCUCCAUGUCCGCGC | 196 |
| AD-1072483.1 | CGCCUCCCACCUGCGCAAGCU | 84 | AGCUUGCGCAGGUGGGAGGCGAG | 219 |
| AD-1072569.1 | GCGCGGAUGGAGGAGAUGGGU | 106 | ACCCAUCUCCUCCAUCCGCGCGC | 241 |
| AD-1072473.1 | GGCCAGAGCACCGAGGAGCUU | 81 | AAGCUCCUCGGUGCUCUGGCCGA | 216 |
| AD-1103868.1 | GCUGCGGGUGCGCCUCGCCUU | 82 | AAGGCGAGGCGCACCCGCAGCUC | 217 |
| AD-1103858.1 | AUGGAGGACGUGCGCGGCCGU | 67 | ACGGCCGCGCACGUCCUCCAUGU | 202 |
| AD-1103857.1 | CAUGGAGGACGUGCGCGGCCU | 66 | AGGCCGCGCACGUCCUCCAUGUC | 201 |
| AD-1103861.1 | GAGGACGUGCGCGGCCGCCUU | 70 | AAGGCGGCCGCGCACGUCCUCCA | 205 |
| AD-1103891.1 | CCCGCCCCAGCCGUCCUCCUU | 142 | AAGGAGGACGGCUGGGGCGGGGA | 277 |
| AD-1103870.1 | GAGCGCGGCCUCAGCGCCAUU | 96 | AAUGGCGCUGAGGCCGCGCUCGG | 231 |
| AD-1103867.1 | GUGCGCGGCCGCCUGGUGCAU | 76 | AUGCACCAGGCGGCCGCGCACGU | 211 |
| AD-1072433.1 | GCGGCCGCCUGGUGCAGUACU | 77 | AGUACUGCACCAGGCGGCCGCAC | 212 |
| AD-1103872.1 | AGCGCCAUCCGCGAGCGCCUU | 98 | AAGGCGCUCGCGGAUGGCGCUGA | 233 |
| AD-1103889.1 | GCCUCCGCGCAGCCUGCAGCU | 140 | AGCUGCAGGCUGCGCGGAGGCAG | 275 |
| AD-1103864.1 | GACGUGCGCGGCCGCCUGGUU | 73 | AACCAGGCGGCCGCGCACGUCCU | 208 |
| AD-1072464.1 | GCCAUGCUCGGCCAGAGCACU | 80 | AGUGCUCUGGCCGAGCAUGGCCU | 215 |
| AD-1103862.1 | AGGACGUGCGCGGCCGCCUGU | 71 | ACAGGCGGCCGCGCACGUCCUCC | 206 |
| AD-1072637.1 | CCAGCAGAUACGCCUGCAGGU | 113 | ACCUGCAGGCGUAUCUGCUGGGC | 248 |
| AD-1072420.1 | CUGGGCGCGGACAUGGAGGAU | 58 | AUCCUCCAUGUCCGCGCCCAGCC | 193 |
| AD-1072238.1 | CAGCGCUGGGAACUGGCACUU | 32 | AAGUGCCAGUUCCCAGCGCUGGC | 167 |
| AD-1103866.1 | CGUGCGCGGCCGCCUGGUGCU | 75 | AGCACCAGGCGGCCGCGCACGUC | 210 |
| AD-1103873.1 | UGGGGCCCCUGGUGGAACAGU | 99 | ACUGUUCCACCAGGGGCCCCAGG | 234 |
| AD-1103869.1 | GUGCGCCUCGCCUCCCACCUU | 83 | AAGGUGGGAGGCGAGGCGCACCC | 218 |
| AD-1072588.1 | GCCUGGACGAGGUGAAGGAGU | 108 | ACUCCUUCACCUCGUCCAGGCGG | 243 |
| AD-1072544.1 | CUGGCAGUGUACCAGGCCGGU | 95 | ACCGGCCUGGUACACUGCCAGGC | 230 |
| AD-1103859.1 | UGGAGGACGUGCGCGGCCGCU | 68 | AGCGGCCGCGCACGUCCUCCAUG | 203 |
| AD-1103853.1 | CGGACAUGGAGGACGUGCGCU | 62 | AGCGCACGUCCUCCAUGUCCGCG | 197 |
| AD-1103856.1 | ACAUGGAGGACGUGCGCGGCU | 65 | AGCCGCGCACGUCCUCCAUGUCC | 200 |
| AD-1072607.1 | GGAGGUGCGCGCCAAGCUGGU | 110 | ACCAGCUUGGCGCGCACCUCCGC | 245 |
| AD-1103860.1 | GGAGGACGUGCGCGGCCGCCU | 69 | AGGCGGCCGCGCACGUCCUCCAU | 204 |
| AD-1103884.1 | GCGACCCCACGCCACCCCGUU | 135 | AACGGGGUGGCGUGGGGUCGCAU | 270 |
| AD-1072551.1 | GCCGCCACUGUGGGCUCCCUU | 102 | AAGGGAGCCCACAGUGGCGGCCC | 237 |
| AD-1103874.1 | CCCCUGGUGGAACAGGGCCGU | 100 | ACGGCCCUGUUCCACCAGGGGCC | 235 |
| AD-1103890.1 | CCUGUCCCCGCCCCAGCCGUU | 141 | AACGGCUGGGGCGGGGACAGGGU | 276 |
| AD-1103881.1 | ACCAGCGCCGCCCCUGUGCCU | 126 | AGGCACAGGGGCGGCGCUGGUGC | 261 |
| AD-1103887.1 | CGUGCCUCCUGCCUCCGCGCU | 138 | AGCGCGGAGGCAGGAGGCACGGG | 273 |
| AD-1103863.1 | GGACGUGCGCGGCCGCCUGGU | 72 | ACCAGGCGGCCGCGCACGUCCUC | 207 |
| AD-1072509.1 | GGCUCCUCCGCGAUGCCGAUU | 89 | AAUCGGCAUCGCGGAGGAGCCGC | 224 |
| AD-1103892.1 | CCCAGCCGUCCUCCUGGGGUU | 143 | AACCCCAGGAGGACGGCUGGGGC | 278 |
| AD-1103877.1 | GCCGCUACAGGAGCGGGCCCU | 105 | AGGGCCCGCUCCUGUAGCGGCUG | 240 |
| AD-1103865.1 | ACGUGCGCGGCCGCCUGGUGU | 74 | ACACCAGGCGGCCGCGCACGUCC | 209 |
| AD-1072649.1 | GCAGGCCGAGGCCUUCCAGGU | 115 | ACCUGGAAGGCCUCGGCCUGCAG | 250 |
| AD-1103880.1 | AGCCCCUGGUGGAAGACAUGU | 121 | ACAUGUCUUCCACCAGGGGCUCG | 256 |
| AD-1103878.1 | CCGAGGCCUUCCAGGCCCGCU | 116 | AGCGGGCCUGGAAGGCCUCGGCC | 251 |
| AD-1072163.1 | UCACAUUCCUGGCAGGAUGCU | 23 | AGCAUCCUGCCAGGAAUGUGACC | 158 |
| AD-1072681.1 | GCCGGGCUGGUGGAGAAGGUU | 124 | AACCUUCUCCACCAGCCCGGCCC | 259 |
| AD-1072559.1 | GGCCAGCCGCUACAGGAGCGU | 104 | ACGCUCCUGUAGCGGCUGGCCGG | 239 |
| AD-1072538.1 | AAGCGCCUGGCAGUGUACCAU | 94 | AUGGUACACUGCCAGGCGCUUCU | 229 |
| AD-1103876.1 | CCUGGCCGGCCAGCCGCUACU | 103 | AGUAGCGGCUGGCCGGCCAGGGA | 238 |

TABLE 5
APOE Modified Duplex Sequences

| | | SEQ ID | | SEQ ID |
|---|---|---|---|---|
| Duplex ID | Sense Strand Sequence 5′ to 3′ | NO: | Antisense Strand Sequence 5′ to 3′ | NO: |
| AD-1072375.1 | gsgsaguuGfaAfGfGfccuacaaauu(L96) | 319 | asAfsuuuGfuAfGfgccuUfcAfacuccsusu | 454 |
| AD-1072352.1 | gscsgcugAfuGfGfAfcgagaccauu(L96) | 316 | asAfsuggUfcUfCfguccAfuCfagcgcscsc | 451 |
| AD-1072394.1 | uscsggaaCfuGfGfAfggaacaacuu(L96) | 322 | asAfsguuGfuUfCfcuccAfgUfuccgasusu | 457 |
| AD-1072721.1 | ascsgccgAfaGfCfCfugcagccauu(L96) | 402 | asAfsuggCfuGfCfaggcUfuCfggcgususc | 537 |
| AD-1072254.1 | csascuggGfuCfGfCfuuuugggauu(L96) | 305 | asAfsuccCfaAfAfagcgAfcCfcagugscsc | 440 |
| AD-1072189.1 | asasggugGfaGfCfAfagcgguggau(L96) | 296 | asUfsccaCfcGfCfuugcUfcCfaccuusgsg | 431 |
| AD-1072741.1 | gsascccuAfgUfUfUfaauaaagauu(L96) | 416 | asAfsucuUfuAfUfuaaaCfuAfgggucscsa | 551 |
| AD-1072382.1 | asasggccUfaCfAfAfaucggaacuu(L96) | 320 | asAfsguuCfcGfAfuuugUfaGfgccuuscsa | 455 |
| AD-1072129.1 | asgsgaagAfuGfAfAfgguucugugu(L96) | 287 | asCfsacaGfaAfCfcuucAfuCfuuccusgsc | 422 |
| AD-1072514.1 | csusccgcGfaUfGfCfcgaugaccuu(L96) | 360 | asAfsgguCfaUfCfggcaUfcGfcggagsgsa | 495 |
| AD-1072124.1 | csasggcaGfgAfAfGfaugaagguuu(L96) | 286 | asAfsaccUfuCfAfucuuCfcUfgccugsusg | 421 |
| AD-1072337.1 | ascsccagGfaAfCfUfgagggcgcuu(L96) | 314 | asAfsgcgCfcCfUfcaguUfcCfugggusgsa | 449 |
| AD-1072135.1 | asusgaagGfuUfCfUfgugggcugcu(L96) | 288 | asGfscagCfcCfAfcagaAfcCfuucauscsu | 423 |
| AD-1072745.1 | usasguuuAfaUfAfAfagauucaccu(L96) | 417 | asGfsgugAfaUfCfuuuaUfuAfaacuasgsg | 552 |
| AD-1072153.1 | gscsguugCfuGfGfUfcacauuccuu(L96) | 291 | asAfsggaAfuGfUfgaccAfgCfaacgcsasg | 426 |
| AD-1072520.1 | gsasugccGfaUfGfAfccugcagaau(L96) | 361 | asUfsucuGfcAfGfgucaUfcGfgcaucsgsc | 496 |
| AD-1072389.1 | ascsaaauCfgGfAfAfcuggaggaau(L96) | 321 | asUfsuccUfcCfAfguucCfgAfuuugusasg | 456 |
| AD-1072716.1 | ascsugaaCfgCfCfGfaagccugcau(L96) | 401 | asUfsgcaGfgCfUfucggCfgUfucagusgsa | 536 |
| AD-1072222.1 | cscsagcaGfaCfCfGfaguggcagau(L96) | 301 | asUfscugCfcAfCfucggUfcUfgcuggscsg | 436 |
| AD-1072367.1 | ascscaugAfaGfGfAfguugaaggcu(L96) | 318 | asGfsccuUfcAfAfcuccUfuCfaugguscsu | 453 |
| AD-1103894.1 | asgsauucAfcCfAfAfguuucacgcu(L96) | 419 | asGfscguGfaAfAfcuugGfuGfaaucususu | 554 |
| AD-1072651.1 | gscscuucCfaGfGfCfccgccucaau(L96) | 387 | asUfsugaGfgCfGfggccUfgGfaaggcscsu | 522 |
| AD-1072260.1 | gsuscgcuUfuUfGfGfgauuaccugu(L96) | 306 | asCfsaggUfaAfUfcccaAfaAfgcgacscsc | 441 |
| AD-1072265.1 | ususuuggGfaUfUfAfccugcgcugu(L96) | 307 | asCfsagcGfcAfGfguaaUfcCfcaaaasgsc | 442 |
| AD-1072750.1 | usasauaaAfgAfUfUfcaccaaguuu(L96) | 418 | asAfsacuUfgGfUfgaauCfuUfuauuasasa | 553 |
| AD-1072142.1 | ususcuguGfgGfCfUfgcguugcugu(L96) | 289 | asCfsagcAfaCfGfcagcCfcAfcagaascsc | 424 |
| AD-1072328.1 | uscsccagGfuCfAfCfccaggaacuu(L96) | 313 | asAfsguuCfcUfGfggugAfcCfugggasgsc | 448 |
| AD-1072198.1 | csasagcgGfuGfGfAfgacagagccu(L96) | 297 | asGfsgcuCfuGfUfcuccAfcCfgcuugscsu | 432 |
| AD-1072361.1 | gsascgagAfcCfAfUfgaaggaguuu(L96) | 317 | asAfsacuCfcUfUfcaugGfuCfucgucscsa | 452 |
| AD-1072526.1 | gsasugacCfuGfCfAfgaagcgccuu(L96) | 362 | asAfsggcGfcUfUfcugcAfgGfucaucsgsg | 497 |
| AD-1072699.1 | usgsugccCfaGfCfGfacaaucacuu(L96) | 398 | asAfsgugAfuUfGfucgcUfgGfgcacasgsg | 533 |
| AD-1072711.1 | csasaucaCfuGfAfAfcgccgaagcu(L96) | 400 | asGfscuuCfgGfCfguucAfgUfgauugsusc | 535 |
| AD-1103879.1 | csasagagCfuGfGfUfucgagccccu(L96) | 390 | asGfsgggCfuCfGfaaccAfgCfucuugsasg | 525 |
| AD-1103849.1 | gsasggaaCfaAfCfUfgaccccgguu(L96) | 323 | asAfsccgGfgGfUfcaguUfgUfuccucscsa | 458 |
| AD-1072662.1 | cscsgccuCfaAfGfAfgcugguucgu(L96) | 389 | asCfsgaaCfcAfGfcucuUfgAfggcggsgsc | 524 |
| AD-1103883.1 | usgscagcCfaUfGfCfgaccccacgu(L96) | 404 | asCfsgugGfgGfUfcgcaUfgGfcugcasgsg | 539 |
| AD-1072172.1 | usgsgcagGfaUfGfCfcaggccaagu(L96) | 294 | asCfsuugGfcCfUfggcaUfcCfugccasgsg | 429 |
| AD-1072158.1 | gscsugguCfaCfAfUfuccuggcagu(L96) | 292 | asCfsugcCfaGfGfaaugUfgAfccagcsasa | 427 |
| AD-1072705.1 | csasgcgaCfaAfUfCfacugaacgcu(L96) | 399 | asGfscguUfcAfGfugauUfgUfcgcugsgsg | 534 |
| AD-1072147.1 | usgsggcuGfcGfUfUfgcuggucacu(L96) | 290 | asGfsugaCfcAfGfcaacGfcAfgcccascsa | 425 |
| AD-1072593.1 | gsascgagGfuGfAfAfggagcagguu(L96) | 379 | asAfsccuGfcUfCfcuucAfcCfucgucscsa | 514 |
| AD-1072115.1 | gsgsccaaUfcAfCfAfggcaggaagu(L96) | 285 | asCfsuucCfuGfCfcuguGfaUfuggccsasg | 420 |
| AD-1072289.1 | csasgacaCfuGfUfCfugagcagguu(L96) | 310 | asAfsccuGfcUfCfagacAfgUfgucugscsa | 445 |
| AD-1072283.1 | usgsggugCfaGfAfCfacugucugau(L96) | 309 | asUfscagAfcAfGfugucUfgCfacccasgsc | 444 |
| AD-1103871.1 | csgsgccuCfaGfCfGfccauccgcgu(L96) | 367 | asCfsgcgGfaUfGfgcgcUfgAfggccgscsg | 502 |
| AD-1072183.1 | csasggccAfaGfGfUfggagcaagcu(L96) | 295 | asGfscuuGfcUfCfcaccUfuGfgccugsgsc | 430 |
| AD-1072667.1 | csusggugGfaAfGfAfcaugcagcgu(L96) | 392 | asCfsgcuGfcAfUfgucuUfcCfaccagsgsg | 527 |
| AD-1072614.1 | csgscgccAfaGfCfUfggaggagcau(L96) | 381 | asUfsgcuCfcUfCfcagcUfuGfgcgcgscsa | 516 |
| AD-1072632.1 | csasggccCfaGfCfAfgauacgccuu(L96) | 382 | asAfsggcGfuAfUfcugcUfgGfgccugscsu | 517 |
| AD-1072211.1 | cscscgagCfuGfCfGfccagcagacu(L96) | 299 | asGfsucuGfcUfGfgcgcAfgCfucgggscsu | 434 |
| AD-1072406.1 | gscsacggCfuGfUfCfcaaggagcuu(L96) | 325 | asAfsgcuCfcUfUfggacAfgCfcgugcscsc | 460 |
| AD-1103882.1 | gscscccuGfuGfCfCfcagcgacaau(L96) | 397 | asUfsuguCfgCfUfgggcAfcAfggggcsgsg | 532 |
| AD-1103855.1 | gsascaugGfaGfGfAfcgugcgcggu(L96) | 334 | asCfscgcGfcAfCfguccUfcCfaugucscsg | 469 |
| AD-1072726.1 | gsasagccUfgCfAfGfccaugcgacu(L96) | 403 | asGfsucgCfaUfGfgcugCfaGfgcuucsgsg | 538 |
| AD-1103893.1 | uscscuggGfgUfGfGfacccuaguuu(L96) | 414 | asAfsacuAfgGfGfuccaCfcCfcaggasgsg | 549 |
| AD-1072736.1 | gsgsguggAfcCfCfUfaguuuaauau(L96) | 415 | asUfsauuAfaAfCfuaggGfuCfcacccscsa | 550 |
| AD-1072426.1 | gscsggacAfuGfGfAfggacgugugu(L96) | 330 | asCfsacaCfgUfCfcuccAfuGfuccgcsgsc | 465 |
| AD-1072506.1 | gsusaagcGfgCfUfCfcuccgcgauu(L96) | 358 | asAfsucgCfgGfAfggagCfcGfcuuacsgsc | 493 |
| AD-1072248.1 | asascuggCfaCfUfGfggucgcuuuu(L96) | 304 | asAfsaagCfgAfCfccagUfgCfcaguuscsc | 439 |
| AD-1072203.1 | gsgsuggaGfaCfAfGfagccggagcu(L96) | 298 | asGfscucCfgGfCfucugUfcUfccaccsgsc | 433 |
| AD-1103888.1 | csusccugCfcUfCfCfgcgcagccuu(L96) | 409 | asAfsggcUfgCfGfcggaGfgCfaggagsgsc | 544 |
| AD-1072243.1 | csusgggaAfcUfGfGfcacugggucu(L96) | 303 | asGfsaccCfaGfUfgccaGfuUfcccagscsg | 438 |
| AD-1103886.1 | cscsacccCfgUfGfCfcuccugccuu(L96) | 407 | asAfsggcAfgGfAfggcaCfgGfgguggscsg | 542 |
| AD-1072347.1 | usgsagggCfgCfUfGfauggacgagu(L96) | 315 | asCfsucgUfcCfAfucagCfgCfccucasgsu | 450 |
| AD-1072411.1 | gscsugucCfaAfGfGfagcugcaggu(L96) | 326 | asCfscugCfaGfCfuccuUfgGfacagcscsg | 461 |
| AD-1072319.1 | csusgcucAfgCfUfCfccaggucacu(L96) | 312 | asGfsugaCfcUfGfggagCfuGfagcagscsu | 447 |
| AD-1103885.1 | cscscacgCfcAfCfCfccgugccucu(L96) | 406 | asGfsaggCfaCfGfggguGfgCfgugggsgsu | 541 |
| AD-1072488.1 | cscscaccUfgCfGfCfaagcugcguu(L96) | 355 | asAfscgcAfgCfUfugcgCfaGfgugggsasg | 490 |
| AD-1072532.1 | csusgcagAfaGfCfGfccuggcaguu(L96) | 363 | asAfscugCfcAfGfgcgcUfuCfugcagsgsu | 498 |
| AD-1072493.1 | csusgcgcAfaGfCfUfgcguaagcgu(L96) | 356 | asCfsgcuUfaCfGfcagcUfuGfcgcagsgsu | 491 |
| AD-1072686.1 | gscsugguGfgAfGfAfaggugcaggu(L96) | 395 | asCfscugCfaCfCfuucuCfcAfccagcscsc | 530 |
| AD-1072656.1 | cscsaggcCfcGfCfCfucaagagcuu(L96) | 388 | asAfsgcuCfuUfGfaggcGfgGfccuggsasa | 523 |
| AD-1103851.1 | csgscggaCfaUfGfGfaggacgugcu(L96) | 329 | asGfscacGfuCfCfuccaUfgUfccgcgscsc | 464 |
| AD-1072216.1 | gscsugcgCfcAfGfCfagaccgaguu(L96) | 300 | asAfscucGfgUfCfugcuGfgCfgcagcsusc | 435 |
| AD-1072455.1 | gsasggugCfaGfGfCfcaugcucggu(L96) | 349 | asCfscgaGfcAfUfggccUfgCfaccucsgsc | 484 |
| AD-1072581.1 | csgscgacCfgCfCfUfggacgagguu(L96) | 377 | asAfsccuCfgUfCfcaggCfgGfucgcgsgsg | 512 |
| AD-1072499.1 | asasgcugCfgUfAfAfgcggcuccuu(L96) | 357 | asAfsggaGfcCfGfcuuaCfgCfagcuusgsc | 492 |
| AD-1103854.1 | gsgsacauGfgAfGfGfacgugcgcgu(L96) | 333 | asCfsgcgCfaCfGfuccuCfcAfuguccsgsc | 468 |
| AD-1072672.1 | gsgsaagaCfaUfGfCfagcgccaguu(L96) | 393 | asAfscugGfcGfCfugcaUfgUfcuuccsasc | 528 |
| AD-1072644.1 | csgsccugCfaGfGfCfcgaggccuuu(L96) | 384 | asAfsaggCfcUfCfggccUfgCfaggcgsusa | 519 |
| AD-1103850.1 | gscsccggCfuGfGfGfcgcggacauu(L96) | 327 | asAfsuguCfcGfCfgcccAfgCfcgggcscsu | 462 |
| AD-1103875.1 | csgscgugCfgGfGfCfcgccacuguu(L96) | 371 | asAfscagUfgGfCfggccCfgCfacgcgsgsc | 506 |
| AD-1072401.1 | csgscgggCfaCfGfGfcuguccaagu(L96) | 324 | asCfsuugGfaCfAfgccgUfgCfccgcgsusc | 459 |
| AD-1072438.1 | csgsccugGfuGfCfAfguaccgcggu(L96) | 348 | asCfscgcGfgUfAfcugcAfcCfaggcgsgsc | 483 |
| AD-1072310.1 | csasggagGfaGfCfUfgcucagcucu(L96) | 311 | asGfsagcUfgAfGfcagcUfcCfuccugscsa | 446 |
| AD-1072277.1 | csusgcgcUfgGfGfUfgcagacacuu(L96) | 308 | asAfsgugUfcUfGfcaccCfaGfcgcagsgsu | 443 |
| AD-1103852.1 | gscsggacAfuGfGfAfggacgugcgu(L96) | 331 | asCfsgcaCfgUfCfcuccAfuGfuccgcsgsc | 466 |
| AD-1072483.1 | csgsccucCfcAfCfCfugcgcaagcu(L96) | 354 | asGfscuuGfcGfCfagguGfgGfaggcgsasg | 489 |
| AD-1072569.1 | gscsgcggAfuGfGfAfggagaugggu(L96) | 376 | asCfsccaUfcUfCfcuccAfuCfcgcgcsgsc | 511 |
| AD-1072473.1 | gsgsccagAfgCfAfCfcgaggagcuu(L96) | 351 | asAfsgcuCfcUfCfggugCfuCfuggccsgsa | 486 |
| AD-1103868.1 | gscsugcgGfgUfGfCfgccucgccuu(L96) | 352 | asAfsggcGfaGfGfcgcaCfcCfgcagcsusc | 487 |
| AD-1103858.1 | asusggagGfaCfGfUfgcgcggccgu(L96) | 337 | asCfsggcCfgCfGfcacgUfcCfuccausgsu | 472 |
| AD-1103857.1 | csasuggaGfgAfCfGfugcgcggccu(L96) | 336 | asGfsgccGfcGfCfacguCfcUfccaugsusc | 471 |
| AD-1103861.1 | gsasggacGfuGfCfGfcggccgccuu(L96) | 340 | asAfsggcGfgCfCfgcgcAfcGfuccucscsa | 475 |
| AD-1103891.1 | cscscgccCfcAfGfCfcguccuccuu(L96) | 412 | asAfsggaGfgAfCfggcuGfgGfgcgggsgsa | 547 |
| AD-1103870.1 | gsasgcgcGfgCfCfUfcagcgccauu(L96) | 366 | asAfsuggCfgCfUfgaggCfcGfcgcucsgsg | 501 |
| AD-1103867.1 | gsusgcgcGfgCfCfGfccuggugcau(L96) | 346 | asUfsgcaCfcAfGfgcggCfcGfcgcacsgsu | 481 |
| AD-1072433.1 | gscsggccGfcCfUfGfgugcaguacu(L96) | 347 | asGfsuacUfgCfAfccagGfcGfgccgcsasc | 482 |
| AD-1103872.1 | asgscgccAfuCfCfGfcgagcgccuu(L96) | 368 | asAfsggcGfcUfCfgcggAfuGfgcgcusgsa | 503 |
| AD-1103889.1 | gscscuccGfcGfCfAfgccugcagcu(L96) | 410 | asGfscugCfaGfGfcugcGfcGfgaggcsasg | 545 |
| AD-1103864.1 | gsascgugCfgCfGfGfccgccugguu(L96) | 343 | asAfsccaGfgCfGfgccgCfgCfacgucscsu | 478 |
| AD-1072464.1 | gscscaugCfuCfGfGfccagagcacu(L96) | 350 | asGfsugcUfcUfGfgccgAfgCfauggcscsu | 485 |
| AD-1103862.1 | asgsgacgUfgCfGfCfggccgccugu(L96) | 341 | asCfsaggCfgGfCfcgcgCfaCfguccuscsc | 476 |
| AD-1072637.1 | cscsagcaGfaUfAfCfgccugcaggu(L96) | 383 | asCfscugCfaGfGfcguaUfcUfgcuggsgsc | 518 |
| AD-1072420.1 | csusgggcGfcGfGfAfcauggaggau(L96) | 328 | asUfsccuCfcAfUfguccGfcGfcccagscsc | 463 |
| AD-1072238.1 | csasgcgcUfgGfGfAfacuggcacuu(L96) | 302 | asAfsgugCfcAfGfuuccCfaGfcgcugsgsc | 437 |
| AD-1103866.1 | csgsugcgCfgGfCfCfgccuggugcu(L96) | 345 | asGfscacCfaGfGfcggcCfgCfgcacgsusc | 480 |
| AD-1103873.1 | usgsgggcCfcCfUfGfguggaacagu(L96) | 369 | asCfsuguUfcCfAfccagGfgGfccccasgsg | 504 |
| AD-1103869.1 | gsusgcgcCfuCfGfCfcucccaccuu(L96) | 353 | asAfsgguGfgGfAfggcgAfgGfcgcacscsc | 488 |
| AD-1072588.1 | gscscuggAfcGfAfGfgugaaggagu(L96) | 378 | asCfsuccUfuCfAfccucGfuCfcaggcsgsg | 513 |
| AD-1072544.1 | csusggcaGfuGfUfAfccaggccggu(L96) | 365 | asCfscggCfcUfGfguacAfcUfgccagsgsc | 500 |
| AD-1103859.1 | usgsgaggAfcGfUfGfcgcggccgcu(L96) | 338 | asGfscggCfcGfCfgcacGfuCfcuccasusg | 473 |
| AD-1103853.1 | csgsgacaUfgGfAfGfgacgugcgcu(L96) | 332 | asGfscgcAfcGfUfccucCfaUfguccgscsg | 467 |
| AD-1103856.1 | ascsauggAfgGfAfCfgugcgcggcu(L96) | 335 | asGfsccgCfgCfAfcgucCfuCfcauguscsc | 470 |
| AD-1072607.1 | gsgsagguGfcGfCfGfccaagcuggu(L96) | 380 | asCfscagCfuUfGfgcgcGfcAfccuccsgsc | 515 |
| AD-1103860.1 | gsgsaggaCfgUfGfCfgcggccgccu(L96) | 339 | asGfsgcgGfcCfGfcgcaCfgUfccuccsasu | 474 |
| AD-1103884.1 | gscsgaccCfcAfCfGfccaccccguu(L96) | 405 | asAfscggGfgUfGfgcguGfgGfgucgcsasu | 540 |
| AD-1072551.1 | gscscgccAfcUfGfUfgggcucccuu(L96) | 372 | asAfsgggAfgCfCfcacaGfuGfgcggcscsc | 507 |
| AD-1103874.1 | cscsccugGfuGfGfAfacagggccgu(L96) | 370 | asCfsggcCfcUfGfuuccAfcCfaggggscsc | 505 |
| AD-1103890.1 | cscsugucCfcCfGfCfcccagccguu(L96) | 411 | asAfscggCfuGfGfggcgGfgGfacaggsgsu | 546 |
| AD-1103881.1 | ascscagcGfcCfGfCfcccugugccu(L96) | 396 | asGfsgcaCfaGfGfggcgGfcGfcuggusgsc | 531 |
| AD-1103887.1 | csgsugccUfcCfUfGfccuccgcgcu(L96) | 408 | asGfscgcGfgAfGfgcagGfaGfgcacgsgsg | 543 |
| AD-1103863.1 | gsgsacguGfcGfCfGfgccgccuggu(L96) | 342 | asCfscagGfcGfGfccgcGfcAfcguccsusc | 477 |
| AD-1072509.1 | gsgscuccUfcCfGfCfgaugccgauu(L96) | 359 | asAfsucgGfcAfUfcgcgGfaGfgagccsgsc | 494 |
| AD-1103892.1 | cscscagcCfgUfCfCfuccugggguu(L96) | 413 | asAfscccCfaGfGfaggaCfgGfcugggsgsc | 548 |
| AD-1103877.1 | gscscgcuAfcAfGfGfagcgggcccu(L96) | 375 | asGfsggcCfcGfCfuccuGfuAfgcggcsusg | 510 |
| AD-1103865.1 | ascsgugcGfcGfGfCfcgccuggugu(L96) | 344 | asCfsaccAfgGfCfggccGfcGfcacguscsc | 479 |
| AD-1072649.1 | gscsaggcCfgAfGfGfccuuccaggu(L96) | 385 | asCfscugGfaAfGfgccuCfgGfccugcsasg | 520 |
| AD-1103880.1 | asgsccccUfgGfUfGfgaagacaugu(L96) | 391 | asCfsaugUfcUfUfccacCfaGfgggcuscsg | 526 |
| AD-1103878.1 | cscsgaggCfcUfUfCfcaggcccgcu(L96) | 386 | asGfscggGfcCfUfggaaGfgCfcucggscsc | 521 |
| AD-1072163.1 | uscsacauUfcCfUfGfgcaggaugcu(L96) | 293 | asGfscauCfcUfGfccagGfaAfugugascsc | 428 |
| AD-1072681.1 | gscscgggCfuGfGfUfggagaagguu(L96) | 394 | asAfsccuUfcUfCfcaccAfgCfccggcscsc | 529 |
| AD-1072559.1 | gsgsccagCfcGfCfUfacaggagcgu(L96) | 374 | asCfsgcuCfcUfGfuagcGfgCfuggccsgsg | 509 |
| AD-1072538.1 | asasgcgcCfuGfGfCfaguguaccau(L96) | 364 | asUfsgguAfcAfCfugccAfgGfcgcuuscsu | 499 |
| AD-1103876.1 | cscsuggcCfgGfCfCfagccgcuacu(L96) | 373 | asGfsuagCfgGfCfuggcCfgGfccaggsgsa | 508 |

TABLE 7
Selected APOE Unmodified Sense and Antisense Strand Sequences From Table 2 Targeting the Pathogenic
APOE4 Allele

| | SEQ | | SEQ | | Antisense Strand |
|---|---|---|---|---|---|
| Sense Sequence | ID | Antisense Sequence | ID | Sense Strand Target | Target Site in |
| 5′ to 3′ | NO: | 5′ to 3′ | NO: | Site in NM_000041.4 | NM_000041.4 |
| CGCGGACAUGGAGGACGUGCU | 59 | AGCACGUCCUCCAUGUCCGCGCC | 194 | NM_000041.4_438- | NM_000041.4_436- |
| | | | | 458_U20C_G21U_s | 458_C1A_A2G_as |
| GCGGACAUGGAGGACGUGCGU | 61 | ACGCACGUCCUCCAUGUCCGCGC | 196 | NM_000041.4_439- | NM_000041.4_437- |
| | | | | 459_U19C_C21U_s | 459_G1A_A3G_as |
| CGGACAUGGAGGACGUGCGCU | 62 | AGCGCACGUCCUCCAUGUCCGCG | 197 | NM_000041.4_440- | NM_000041.4_438- |
| | | | | 460_U18C_G21U_s | 460_C1A_A4G_as |
| GGACAUGGAGGACGUGCGCGU | 63 | ACGCGCACGUCCUCCAUGUCCGC | 198 | NM_000041.4_441- | NM_000041.4_439- |
| | | | | 461_U17C_G21U_s | 461_C1A_A5G_as |
| GACAUGGAGGACGUGCGCGGU | 64 | ACCGCGCACGUCCUCCAUGUCCG | 199 | NM_000041.4_442- | NM_000041.4_440- |
| | | | | 462_U16C_C21U_s | 462_G1A_A6G_as |
| ACAUGGAGGACGUGCGCGGCU | 65 | AGCCGCGCACGUCCUCCAUGUCC | 200 | NM_000041.4_443- | NM_000041.4_441- |
| | | | | 463_U15C_C21U_s | 463_G1A_A7G_as |
| CAUGGAGGACGUGCGCGGCCU | 66 | AGGCCGCGCACGUCCUCCAUGUC | 201 | NM_000041.4_444- | NM_000041.4_442- |
| | | | | 464_U14C_G21U_s | 464_C1A_A8G_as |
| AUGGAGGACGUGCGCGGCCGU | 67 | ACGGCCGCGCACGUCCUCCAUGU | 202 | NM_000041.4_445- | NM_000041.4_443- |
| | | | | 465_U13C_C21U_s | 465_G1A_A9G_as |
| UGGAGGACGUGCGCGGCCGCU | 68 | AGCGGCCGCGCACGUCCUCCAUG | 203 | NM_000041.4_446- | NM_000041.4_444- |
| | | | | 466_U12C_C21U_s | 466_G1A_A10G_as |
| GGAGGACGUGCGCGGCCGCCU | 69 | AGGCGGCCGCGCACGUCCUCCAU | 204 | NM_000041.4_447- | NM_000041.4_445- |
| | | | | 467_U11C_s | 467_AllG_as |
| GAGGACGUGCGCGGCCGCCUU | 70 | AAGGCGGCCGCGCACGUCCUCCA | 205 | NM_000041.4_448- | NM_000041.4_446- |
| | | | | 468_U10C_G21U_s | 468_C1A_A12G_as |
| AGGACGUGCGCGGCCGCCUGU | 71 | ACAGGCGGCCGCGCACGUCCUCC | 206 | NM_000041.4_449- | NM_000041.4_447- |
| | | | | 469_U9C_G21U_s | 469_C1A_A13G_as |
| GGACGUGCGCGGCCGCCUGGU | 72 | ACCAGGCGGCCGCGCACGUCCUC | 207 | NM_000041.4_450- | NM_000041.4_448- |
| | | | | 470_U8C_s | 470_A14G_as |
| GACGUGCGCGGCCGCCUGGUU | 73 | AACCAGGCGGCCGCGCACGUCCU | 208 | NM_000041.4_451- | NM_000041.4_449- |
| | | | | 471_U7C_G21U_s | 471_C1A_A15G_as |
| ACGUGCGCGGCCGCCUGGUGU | 74 | ACACCAGGCGGCCGCGCACGUCC | 209 | NM_000041.4_452- | NM_000041.4_450- |
| | | | | 472_U6C_C21U_s | 472_G1A_A16G_as |
| CGUGCGCGGCCGCCUGGUGCU | 75 | AGCACCAGGCGGCCGCGCACGUC | 210 | NM_000041.4_453- | NM_000041.4_451- |
| | | | | 473_U5C_A21U_s | 473_U1A_A17G_as |
| GUGCGCGGCCGCCUGGUGCAU | 76 | AUGCACCAGGCGGCCGCGCACGU | 211 | NM_000041.4_454- | NM_000041.4_452- |
| | | | | 474_U4C_G21U_s | 474_C1A_A18G_as |

TABLE 8
Selected APOE Modified Sense and Antisense Strand Sequences From Table 2 Targeting the Pathogenic
APOE4 Allele

| | SEQ | | SEQ | | SEQ |
|---|---|---|---|---|---|
| Sense Sequence | ID | Antisense Sequence | ID | mRNA Target Sequence | ID |
| 5′ to 3′ | NO: | 5′ to 3′ | NO: | 5′ to 3′ | NO: |
| csgscggaCfaUfGfGfaggacgugcuL96 | 329 | asGfscacGfuCfCfuccaUfgUfccgcgscsc | 464 | GGCGCGGACATGGAGGACGTGCG | 599 |
| gscsggacAfuGfGfAfggacgugcguL96 | 331 | asCfsgcaCfgUfCfcuccAfuGfuccgcsgsc | 466 | GCGCGGACATGGAGGACGTGCGC | 601 |
| csgsgacaUfgGfAfGfgacgugcgcuL96 | 332 | asGfscgcAfcGfUfccucCfaUfguccgscsg | 467 | CGCGGACATGGAGGACGTGCGCG | 602 |
| gsgsacauGfgAfGfGfacgugcgcguL96 | 333 | asCfsgcgCfaCfGfuccuCfcAfuguccsgsc | 468 | GCGGACATGGAGGACGTGCGCGG | 603 |
| gsascaugGfaGfGfAfcgugcgcgguL96 | 334 | asCfscgcGfcAfCfguccUfcCfaugucscsg | 469 | CGGACATGGAGGACGTGCGCGGC | 604 |
| ascsauggAfgGfAfCfgugcgcggcuL96 | 335 | asGfsccgCfgCfAfcgucCfuCfcauguscsc | 470 | GGACATGGAGGACGTGCGCGGCC | 605 |
| csasuggaGfgAfCfGfugcgcggccuL96 | 336 | asGfsgccGfcGfCfacguCfcUfccaugsusc | 471 | GACATGGAGGACGTGCGCGGCCG | 606 |
| asusggagGfaCfGfUfgcgcggccguL96 | 337 | asCfsggcCfgCfGfcacgUfcCfuccausgsu | 472 | ACATGGAGGACGTGCGCGGCCGC | 607 |
| usgsgaggAfcGfUfGfcgcggccgcuL96 | 338 | asGfscggCfcGfCfgcacGfuCfcuccasusg | 473 | CATGGAGGACGTGCGCGGCCGCC | 608 |
| gsgsaggaCfgUfGfCfgcggccgccuL96 | 339 | asGfsgcgGfcCfGfcgcaCfgUfccuccsasu | 474 | ATGGAGGACGTGCGCGGCCGCCT | 609 |
| gsasggacGfuGfCfGfcggccgccuuL96 | 340 | asAfsggcGfgCfCfgcgcAfcGfuccucscsa | 475 | TGGAGGACGTGCGCGGCCGCCTG | 610 |
| asgsgacgUfgCfGfCfggccgccuguL96 | 341 | asCfsaggCfgGfCfcgcgCfaCfguccuscsc | 476 | GGAGGACGTGCGCGGCCGCCTGG | 611 |
| gsgsacguGfcGfCfGfgccgccugguL96 | 342 | asCfscagGfcGfGfccgcGfcAfcguccsusc | 477 | GAGGACGTGCGCGGCCGCCTGGT | 612 |
| gsascgugCfgCfGfGfccgccugguuL96 | 343 | asAfsccaGfgCfGfgccgCfgCfacgucscsu | 478 | AGGACGTGCGCGGCCGCCTGGTG | 613 |
| ascsgugcGfcGfGfCfcgccugguguL96 | 344 | asCfsaccAfgGfCfggccGfcGfcacguscsc | 479 | GGACGTGCGCGGCCGCCTGGTGC | 614 |
| csgsugcgCfgGfCfCfgccuggugcuL96 | 345 | asGfscacCfaGfGfcggcCfgCfgcacgsusc | 480 | GACGTGCGCGGCCGCCTGGTGCA | 615 |
| gsusgcgcGfgCfCfGfccuggugcauL96 | 346 | asUfsgcaCfcAfGfgcggCfcGfcgcacsgsu | 481 | ACGTGCGCGGCCGCCTGGTGCAG | 616 |

TABLE 6
10 nM In Vitro Screening Data

| Duplex ID | Mean | SD |
|---|---|---|
| AD-1072375.1 | 1.4 | 0.6 |
| AD-1072352.1 | 2.4 | 0.3 |
| AD-1072394.1 | 2.9 | 0.3 |
| AD-1072721.1 | 3.2 | 0.5 |
| AD-1072254.1 | 3.2 | 0.0 |
| AD-1072189.1 | 3.5 | 0.3 |
| AD-1072741.1 | 3.5 | 0.8 |
| AD-1072382.1 | 3.7 | 1.0 |
| AD-1072129.1 | 4.0 | 0.5 |
| AD-1072514.1 | 4.2 | 0.3 |
| AD-1072124.1 | 4.2 | 0.8 |
| AD-1072337.1 | 4.3 | 0.6 |
| AD-1072135.1 | 4.6 | 0.9 |
| AD-1072745.1 | 4.7 | 1.1 |
| AD-1072153.1 | 5.0 | 0.3 |
| AD-1072520.1 | 5.7 | 1.2 |
| AD-1072389.1 | 6.5 | 1.6 |
| AD-1072716.1 | 6.5 | 1.3 |
| AD-1072222.1 | 6.8 | 0.4 |
| AD-1072367.1 | 7.1 | 1.0 |
| AD-1103894.1 | 9.2 | 1.3 |
| AD-1072651.1 | 9.2 | 0.8 |
| AD-1072260.1 | 9.4 | 2.0 |
| AD-1072265.1 | 9.4 | 0.9 |
| AD-1072750.1 | 9.9 | 1.8 |
| AD-1072142.1 | 10.1 | 1.3 |
| AD-1072328.1 | 10.2 | 2.3 |
| AD-1072198.1 | 10.3 | 1.7 |
| AD-1072361.1 | 11.2 | 0.6 |
| AD-1072526.1 | 11.4 | 1.5 |
| AD-1072699.1 | 11.8 | 1.4 |
| AD-1072711.1 | 11.8 | 4.0 |
| AD-1103879.1 | 11.9 | 1.6 |
| AD-1103849.1 | 12.1 | 0.4 |
| AD-1072662.1 | 12.6 | 0.8 |
| AD-1103883.1 | 12.7 | 3.2 |
| AD-1072172.1 | 13.2 | 1.4 |
| AD-1072158.1 | 15.4 | 5.8 |
| AD-1072705.1 | 15.7 | 2.5 |
| AD-1072147.1 | 16.6 | 0.7 |
| AD-1072593.1 | 16.8 | 2.3 |
| AD-1072115.1 | 17.0 | 0.4 |
| AD-1072289.1 | 18.6 | 6.5 |
| AD-1072283.1 | 18.9 | 1.6 |
| AD-1103871.1 | 19.2 | 4.2 |
| AD-1072183.1 | 20.2 | 0.5 |
| AD-1072667.1 | 20.3 | 4.5 |
| AD-1072614.1 | 20.4 | 1.7 |
| AD-1072632.1 | 21.0 | 1.3 |
| AD-1072211.1 | 21.2 | 7.2 |
| AD-1072406.1 | 21.3 | 0.4 |
| AD-1103882.1 | 21.9 | 0.9 |
| AD-1103855.1 | 22.0 | 5.9 |
| AD-1072726.1 | 22.8 | 1.5 |
| AD-1103893.1 | 26.0 | 2.3 |
| AD-1072736.1 | 31.5 | 5.0 |
| AD-1072426.1 | 32.4 | 5.5 |
| AD-1072506.1 | 33.7 | 6.4 |
| AD-1072248.1 | 34.2 | 2.1 |
| AD-1072203.1 | 35.4 | 3.7 |
| AD-1103888.1 | 35.5 | 11.3 |
| AD-1072243.1 | 35.8 | 0.6 |
| AD-1103886.1 | 38.9 | 1.2 |
| AD-1072347.1 | 39.4 | 3.1 |
| AD-1072411.1 | 45.5 | 2.6 |
| AD-1072319.1 | 53.0 | 17.3 |
| AD-1103885.1 | 57.0 | 1.6 |
| AD-1072488.1 | 57.3 | 4.4 |
| AD-1072532.1 | 60.1 | 1.8 |
| AD-1072493.1 | 60.5 | 5.4 |
| AD-1072686.1 | 64.8 | 2.5 |
| AD-1072656.1 | 66.4 | 7.3 |
| AD-1103851.1 | 66.6 | 5.4 |
| AD-1072216.1 | 66.6 | 5.1 |
| AD-1072455.1 | 67.3 | 4.3 |
| AD-1072581.1 | 68.5 | 9.7 |
| AD-1072499.1 | 69.5 | 10.1 |
| AD-1103854.1 | 70.4 | 4.7 |
| AD-1072672.1 | 72.6 | 4.0 |
| AD-1072644.1 | 73.6 | 5.8 |
| AD-1103850.1 | 74.2 | 5.0 |
| AD-1103875.1 | 74.5 | 2.4 |
| AD-1072401.1 | 79.5 | 24.3 |
| AD-1072438.1 | 79.5 | 5.7 |
| AD-1072310.1 | 79.6 | 3.4 |
| AD-1072277.1 | 81.9 | 5.0 |
| AD-1103852.1 | 82.0 | 15.0 |
| AD-1072483.1 | 86.5 | 3.1 |
| AD-1072569.1 | 86.6 | 12.8 |
| AD-1072473.1 | 87.1 | 5.6 |
| AD-1103868.1 | 88.8 | 4.6 |
| AD-1103858.1 | 88.9 | 4.4 |
| AD-1103857.1 | 89.8 | 3.4 |
| AD-1103861.1 | 90.3 | 6.5 |
| AD-1103891.1 | 90.5 | 2.9 |
| AD-1103870.1 | 92.2 | 5.7 |
| AD-1103867.1 | 92.5 | 6.5 |
| AD-1072433.1 | 92.5 | 6.5 |
| AD-1103872.1 | 93.0 | 6.5 |
| AD-1103889.1 | 93.6 | 3.6 |
| AD-1103864.1 | 93.7 | 2.3 |
| AD-1072464.1 | 94.1 | 6.3 |
| AD-1103862.1 | 94.1 | 4.8 |
| AD-1072637.1 | 94.7 | 12.4 |
| AD-1072420.1 | 95.0 | 8.6 |
| AD-1072238.1 | 95.4 | 5.0 |
| AD-1103866.1 | 95.9 | 2.6 |
| AD-1103873.1 | 96.5 | 5.7 |
| AD-1103869.1 | 97.2 | 3.1 |
| AD-1072588.1 | 97.8 | 5.4 |
| AD-1072544.1 | 98.0 | 8.7 |
| AD-1103859.1 | 98.0 | 6.2 |
| AD-1103853.1 | 98.3 | 5.6 |
| AD-1103856.1 | 99.3 | 5.1 |
| AD-1072607.1 | 99.5 | 6.1 |
| AD-1103860.1 | 99.6 | 16.5 |
| AD-1103884.1 | 100.0 | 3.0 |
| AD-1072551.1 | 101.2 | 3.1 |
| AD-1103874.1 | 101.3 | 3.6 |
| AD-1103890.1 | 103.4 | 3.4 |
| AD-1103881.1 | 104.3 | 5.2 |
| AD-1103887.1 | 104.9 | 2.6 |
| AD-1103863.1 | 105.6 | 8.2 |
| AD-1072509.1 | 106.5 | 19.7 |
| AD-1103892.1 | 106.6 | 8.2 |
| AD-1103877.1 | 106.9 | 12.2 |
| AD-1103865.1 | 107.0 | 1.9 |
| AD-1072649.1 | 108.5 | 3.9 |
| AD-1103880.1 | 109.2 | 3.3 |
| AD-1103878.1 | 110.2 | 5.8 |
| AD-1072163.1 | 111.3 | 16.3 |
| AD-1072681.1 | 114.6 | 6.8 |
| AD-1072559.1 | 114.9 | 7.2 |
| AD-1072538.1 | 119.3 | 8.0 |
| AD-1103876.1 | 120.4 | 16.4 |

### Example 2. In Vivo Evaluation in Transgenic Mice

[0814] This Example describes methods for the in vivo evaluation of APOE RNAi agents in the APPPS1-21 transgenic mouse model of Alzheimer's disease. These mice overexpress human amyloid precursor protein (APP) cDNA with a Swedish mutation (KM670/671NL) and mutant PS1 with the L166P mutation, The endogenous ApoE gene in these mice was replaced with either the human APOE3 allele or the human APOE4 allele (Huynh, et al. (2017) Neuron 96: 1013-1023).

[0815] The ability of selected dsRNA agents designed and assayed in Example 1 are assessed for their ability to reduce the level of APOE expression, e.g., APOE2, APOE3, and APOE4 expression, in the brain and the liver of these animals.

[0816] Briefly, littermates are intrathecally or subcutaneously administered a single dose of the dsRNA agents of interest, or a placebo. Two weeks after administration, animals are sacrificed, blood and tissue samples, including cerebral cortex, spinal cord, liver, spleen, and cervical lymph nodes, are collected.

[0817] To determine the effect of administration of the dsRNA agents targeting APOE on the level APOE mRNA, mRNA levels are determined in cortex and liver samples by qRT-PCR.

[0818] The effect of administration of the agents targeting APOE on the pathology of Alzheimer's disease in this mouse model is also assessed as described in Huynh, et al. (supra).

[0819] Littermates are intrathecally or subcutaneously administered two doses of the dsRNA agents of interest, or a placebo, at birth and 8 weeks of age. At 16 weeks of age, animals are sacrificed, and blood and tissue samples, including cerebral cortex, spinal cord, liver, spleen, and cervical lymph nodes, are collected and appropriately processed.

[0820] The effect of the dsRNA agents on the deposition of Aβ plaques, the accumulation of Aβ, total neuritic dystrophy, the plaque size and the plaque distribution are assessed. Briefly, for immunofluorescence analysis of tissue samples, after fixation and following immersion in sucrose for at least 24 hours, serial coronal sections are collected from frontal cortex to caudal hippocampus (right hemisphere) using a microtome. Three hippocampal-containing sections from the right hemisphere of each brain are stained with X34 dye to visualize fibrillary plaques or with commercially available antibodies against amyloid-β (such as 82E1) and corresponding fluorescently-labeled secondary antibodies. For analysis, stained sections are scanned at 20× magnification with a confocal microscope. Random windows containing clusters of plaques are captured, spanning the same thickness in the z-plane for all sections. Using suitable software, the volume of the markers are quantified under the same threshold. Each data point represents the average value from three separate tissue sections from one single animal.

### Example 3. In Vivo Evaluation in Humanized APOE Mice

[0821] Humanized ApoE4 knock-in mice (purchased from Jax; stock #027894) for this study were generated by replacing exons 2, 3 and most of exon 4 of the mouse Apoe gene with the human APOE4 gene sequence including exons 2, 3 and 4 (and some 3′ UTR sequence) using standard techniques.

[0822] To assess the in vivo efficacy of duplexes of interest, at Day 0, 9-12 week old, male and female, Ketamine/Xylazine anesthetized homozygous humanized APOE knock-in mice were administered a single 300 μg dose of AD-1204704, AD-1204705, AD-1204705, AD-1204706 AD-1204707, AD-1204708, AD-1204709, AD-1204710, AD-1204711, AD-1204712, or AD-1204713, or artificial CSF (aCSF) control by intracerebroventricular injection (ICV) into the right ventricle using a 25 μl Hamilton syringe and a custom angled 3.5 mm needle.

[0823] Table 9 provides a detailed list of the unmodified APOE sense and antisense strand sequences of the agents used in this example and Table 10 provides a detailed list of the modified APOE sense and antisense strand sequences of the agents used in this example.

[0824] At day 14 post-dose, animals were sacrificed, both hemispheres of the brain and the liver were collected and snap-frozen in liquid nitrogen. mRNA was extracted from the tissue and analyzed by the RT-QPCR method.

[0825] The results of this analysis are provided in FIGS. 1A and 1B and demonstrate that a single 300 kg dose of AD-1204704, AD-1204705, AD-1204708, or AD-1204712 potently knocks down APOE expression in the brain (FIG. 1A) with a lesser effect on peripheral APOE expression (FIG. 1B).

[0826] FIG. 2 depicts the correlation of the activity of the agents in vitro to the activity of the agents in vivo. Specifically, of the 45 duplexes that exhibited greater than 80% knockdown in Hep3B cells (at 10 nM), the top 4 duplexes identified in that in vitro screen showed the best activity in vivo (agents circled, i.e., AD-1204704, AD-1204705, AD-1204708, or AD-1204712).

TABLE 9
Unodified Sense and Antisense Strand Sequences

| | | SEQ | | | SEQ | |
|---|---|---|---|---|---|---|
| Duplex | | ID | Range in | | ID | Range n |
| Name | Sense Sequence 5′ to 3′ | NO: | NM_000041.4 | Antisense Sequence 5′ to 3′ | NO: | NM_000041.4 |
| AD-1204704 | CAGGCAGGAAGAUGAAGGUUA | 690 | 59-79 | UAACCUUCAUCUUCCUGCCUGUG | 700 | 57-79 |
| AD-1204705 | AGGAAGAUGAAGGUUCUGUGA | 691 | 64-84 | UCACAGAACCUUCAUCUUCCUGC | 701 | 62-84 |
| AD-1204706 | UUCUGUGGGCUGCGUUGCUGA | 692 | 77-97 | UCAGCAACGCAGCCCACAGAACC | 702 | 75-97 |
| AD-1204707 | GCGUUGCUGGUCACAUUCCUA | 693 | 88-108 | UAGGAAUGUGACCAGCAACGCAG | 703 | 86-108 |
| AD-1204708 | CACUGGGUCGCUUUUGGGAUA | 694 | 209-229 | UAUCCCAAAAGCGACCCAGUGCC | 704 | 207-229 |
| AD-1204709 | GUCGCUUUUGGGAUUACCUGA | 695 | 215-235 | UCAGGUAAUCCCAAAAGCGACCC | 705 | 213-235 |
| AD-1204710 | UUUUGGGAUUACCUGCGCUGA | 696 | 220-240 | UCAGCGCAGGUAAUCCCAAAAGC | 706 | 218-240 |
| AD-1204711 | CCGCCUCAAGAGCUGGUUCGA | 697 | 900-920 | UCGAACCAGCUCUUGAGGCGGGC | 707 | 898-920 |
| AD-1204712 | GACCCUAGUUUAAUAAAGAUA | 698 | 1130-1150 | UAUCUUUAUUAAACUAGGGUCCA | 708 | 1128-1150 |
| AD-1204713 | CGGCCUCAGCGCCAUCCGCGA | 699 | 639-659 | UCGCGGAUGGCGCUGAGGCCGCG | 709 | 637-659 |

TABLE 10
Modified Sense and Antisense Strand Sequences

| | | SEQ | | SEQ | | SEQ |
|---|---|---|---|---|---|---|
| Duplex | | ID | | ID | mRNA Target Sequence | ID |
| Name | Sense Sequence 5′ to 3′ | NO: | Antisense Sequence 5′ to 3′ | NO: | 5′ to 3′ | NO: |
| AD- | csasggc(Ahd)GfgAfAfGfaugaaggu | 710 | VPusAfsaccUfuCfAfucuuCfcUfgccugs | 720 | CACAGGCAGGAAGAUGAAG | 730 |
| 1204704 | susa | | usg | | GUUC | |
| AD- | asgsgaa(Ghd)AfuGfAfAfgguucug | 711 | VPusCfsacaGfaAfCfcuucAfuCfuuccus | 721 | GCAGGAAGAUGAAGGUUCU | 731 |
| 1204705 | usgsa | | gsc | | GUGG | |
| AD- | ususcug(Uhd)GfgGfCfUfgcguugc | 712 | VPusCfsagcAfaCfGfcagcCfcAfcagaas | 722 | GGUUCUGUGGGCUGCGUUG | 732 |
| 1204706 | usgsa | | csc | | CUGG | |
| AD- | gscsguu(Ghd)CfuGfGfUfcacauucc | 713 | VPusAfsggaAfuGfUfgaccAfgCfaacgcs | 723 | CUGCGUUGCUGGUCACAUU | 733 |
| 1204707 | susa | | asg | | CCUG | |
| AD- | csascug(Ghd)GfuCfGfCfuuuuggga | 714 | VPusAfsuccCfaAfAfagcgAfcCfcagugs | 724 | GGCACUGGGUCGCUUUUGG | 734 |
| 1204708 | susa | | csc | | GAUU | |
| AD- | gsuscgc(Uhd)UfuUfGfGfgauuaccu | 715 | VPusCfsaggUfaAfUfcccaAfaAfgcgacs | 725 | GGGUCGCUUUUGGGAUUAC | 735 |
| 1204709 | sgsa | | csc | | CUGC | |
| AD- | ususuug(Ghd)GfaUfUfAfccugcgcu | 716 | VPusCfsagcGfcAfGfguaaUfcCfcaaaas | 726 | GCUUUUGGGAUUACCUGCG | 736 |
| 1204710 | sgsa | | gsc | | CUGG | |
| AD- | cscsgcc(Uhd)CfaAfGfAfgcugguuc | 717 | VPusCfsgaaCfcAfGfcucuUfgAfggcgg | 727 | GCCCGCCUCAAGAGCUGGU | 737 |
| 1204711 | sgsa | | sgsc | | UCGA | |
| AD- | gsasccc(Uhd)AfgUfUfUfaauaaaga | 718 | VPusAfsucuUfuAfUfuaaaCfuAfggguc | 728 | UGGACCCUAGUUUAAUAAA | 738 |
| 1204712 | susa | | scsa | | GAUU | |
| AD- | csgsgcc(Uhd)CfaGfCfGfccauccgc | 719 | VPusCfsgcgGfaUfGfgcgcUfgAfggccg | 729 | CGCGGCCUCAGCGCCAUCC | 739 |
| 1204713 | sgsa | | scsg | | GCGA | |

Informal Sequence Listing

<210> 1
<211> 1166
<212> DNA
<213> Homo sapiens
<400> 1

| | |
|---|---|
| ctactcagcc ccagcggagg tgaaggacgt ccttccccag gagccgactg gccaatcaca | 60 |
| ggcaggaaga tgaaggttct gtgggctgcg ttgctggtca cattcctggc aggatgccag | 120 |
| gccaaggtgg agcaagcggt ggagacagag ccggagcccg agctgcgcca gcagaccgag | 180 |
| tggcagagcg gccagcgctg ggaactggca ctgggtcgct tttgggatta cctgcgctgg | 240 |
| gtgcagacac tgtctgagca ggtgcaggag gagctgctca gctcccaggt cacccaggaa | 300 |
| ctgagggcgc tgatggacga gaccatgaag gagttgaagg cctacaaatc ggaactggag | 360 |
| gaacaactga ccccggtggc ggaggagacg cgggcacggc tgtccaagga gctgcaggcg | 420 |
| gcgcaggccc ggctgggcgc ggacatggag gacgtgtgcg gccgcctggt gcagtaccgc | 480 |
| ggcgaggtgc aggccatgct cggccagagc accgaggagc tgcgggtgcg cctcgcctcc | 540 |
| cacctgcgca agctgcgtaa gcggctcctc cgcgatgccg atgacctgca gaagcgcctg | 600 |
| gcagtgtacc aggccggggc ccgcgagggc gccgagcgcg gcctcagcgc catccgcgag | 660 |
| cgcctggggc ccctggtgga acagggccgc gtgcgggccg ccactgtggg ctccctggcc | 720 |
| ggccagccgc tacaggagcg ggcccaggcc tggggcgagc ggctgcgcgc gcggatggag | 780 |
| gagatgggca gccggacccg cgaccgcctg gacgaggtga aggagcaggt ggcggaggtg | 840 |
| cgcgccaagc tggaggagca ggcccagcag atacgcctgc aggccgaggc cttccaggcc | 900 |
| cgcctcaaga gctggttcga gcccctggtg gaagacatgc agcgccagtg ggccgggctg | 960 |
| gtggagaagg tgcaggctgc cgtgggcacc agcgccgccc ctgtgcccag cgacaatcac | 1020 |
| tgaacgccga agcctgcagc catgcgaccc cacgccaccc cgtgcctcct gcctccgcgc | 1080 |
| agcctgcagc gggagaccct gtccccgccc cagccgtcct cctggggtgg accctagttt | 1140 |
| aataaagatt caccaagttt cacgca | 1166 |

<210> 2
<211> 1166
<212> DNA
<213> Homo sapiens
<400> 2

| | |
|---|---|
| tgcgtgaaac ttggtgaatc tttattaaac tagggtccac cccaggagga cggctggggc | 60 |
| ggggacaggg tctcccgctg caggctgcgc ggaggcagga ggcacggggt ggcgtggggt | 120 |
| cgcatggctg caggcttcgg cgttcagtga ttgtcgctgg gcacaggggc ggcgctggtg | 180 |
| cccacggcag cctgcacctt ctccaccagc ccggcccact ggcgctgcat gtcttccacc | 240 |
| aggggctcga accagctctt gaggcgggcc tggaaggcct cggcctgcag gcgtatctgc | 300 |
| tgggcctgct cctccagctt ggcgcgcacc tccgccacct gctccttcac ctcgtccagg | 360 |
| cggtcgcggg tccggctgcc catctcctcc atccgcgcgc gcagccgctc gccccaggcc | 420 |
| tgggcccgct cctgtagcgg ctggccggcc agggagccca cagtggcggc ccgcacgcgg | 480 |
| ccctgttcca ccaggggccc caggcgctcg cggatggcgc tgaggccgcg ctcggcgccc | 540 |
| tcgcgggccc cggcctggta cactgccagg cgcttctgca ggtcatcggc atcgcggagg | 600 |
| agccgcttac gcagcttgcg caggtgggag gcgaggcgca cccgcagctc ctcggtgctc | 660 |
| tggccgagca tggcctgcac ctcgccgcgg tactgcacca ggcggccgca cacgtcctcc | 720 |
| atgtccgcgc ccagccgggc ctgcgccgcc tgcagctcct tggacagccg tgcccgcgtc | 780 |
| tcctccgcca ccggggtcag ttgttcctcc agttccgatt tgtaggcctt caactccttc | 840 |
| atggtctcgt ccatcagcgc cctcagttcc tgggtgacct gggagctgag cagctcctcc | 900 |
| tgcacctgct cagacagtgt ctgcacccag cgcaggtaat cccaaaagcg acccagtgcc | 960 |
| agttcccagc gctggccgct ctgccactcg gtctgctggc gcagctcggg ctccggctct | 1020 |
| gtctccaccg cttgctccac cttggcctgg catcctgcca ggaatgtgac cagcaacgca | 1080 |
| gcccacagaa ccttcatctt cctgcctgtg attggccagt cggctcctgg ggaaggacgt | 1140 |
| ccttcacctc cgctggggct gagtag | 1166 |

<210> 3
<211> 1212
<212> DNA
<213> Rattus norvegicus
<400> 3

| | |
|---|---|
| ataattggac aggtctggga tccggtcccc tgctcagacc ccggaggcta aggagttgtt | 60 |
| tcggaaggag ctggtaagac aagcttgggc tggcgattca cccagggggc ttgactggcc | 120 |
| aatcacaact gggaagatga aggctctgtg ggccctgctg ttggtcccat tgctgacagg | 180 |
| atgcctggcc gagggagagc tggaggtgac agatcagctc ccagggcaaa gcgaccaacc | 240 |
| ctgggagcag gccctgaacc gcttctggga ttacctgcgc tgggtgcaga cgctttctga | 300 |
| ccaggtccag gaagagctgc agagctccca agtcacacag gaactgacgg tactgatgga | 360 |
| ggacactatg acggaagtaa aggcatacaa aaaggagctg gaggaacagc tgggcccagt | 420 |
| ggcggaggag acacgggcca ggctggctaa agaggtgcag gcggcacagg cccgtctggg | 480 |
| agctgacatg gaggatctac gcaaccgact cgggcagtac cgcaacgagg taaacaccat | 540 |
| gctgggccag agcacagagg agctgcggtc gcgcctctcc acacacctgc gcaagatgcg | 600 |
| caagcgcctg atgcgggatg cggatgatct gcagaagcgc ctggcggtgt acaaggccgg | 660 |
| ggcacaggag ggcgccgagc gcggtgtgag tgctatccgt gagcgcctgg ggccactggt | 720 |
| ggagcagggt cgtcagcgca cagccaacct aggcgctggc gccgcccagc ccctgcgcga | 780 |
| tcgcgcccag gctttgagtg accgcatccg agggcggctg gaggaagtgg gcaaccaggc | 840 |
| ccgagaccgc ctagaggagg tgcgtgagca gatggaggag gtgcgctcca agatggagga | 900 |
| gcagacccag cagatacgcc tgcaggccga gatcttccag gcccgcatca agggctggtt | 960 |
| cgagccgcta gtggaagaca tgcagcgcca gtgggcaaac ctaatggaga agatacaggc | 1020 |
| ctctgtggct accaactcca ttgcctccac cacagtgccc ctggagaatc aatgatcatc | 1080 |
| cctcacctac gccctgccgc aacatccatg accagccagg tggccctgtc ccaagcacca | 1140 |
| ctctggccct ctggtggccc ttgcttaata aagattctcc aagcaaaaaa aaaaaaaaaa | 1200 |
| aaaaaaaaaa aa | 1212 |

<210> 4
<211> 1212
<212> DNA
<213> Rattus norvegicus
<400> 4

| | |
|---|---|
| tttttttttt tttttttttt ttttttttgc ttggagaatc tttattaagc aagggccacc | 60 |
| agagggccag agtggtgctt gggacagggc cacctggctg gtcatggatg ttgcggcagg | 120 |
| gcgtaggtga gggatgatca ttgattctcc aggggcactg tggtggaggc aatggagttg | 180 |
| gtagccacag aggcctgtat cttctccatt aggtttgccc actggcgctg catgtcttcc | 240 |
| actagcggct cgaaccagcc cttgatgcgg gcctggaaga tctcggcctg caggcgtatc | 300 |
| tgctgggtct gctcctccat cttggagcgc acctcctcca tctgctcacg cacctcctct | 360 |
| aggcggtctc gggcctggtt gcccacttcc tccagccgcc ctcggatgcg gtcactcaaa | 420 |
| gcctgggcgc gatcgcgcag gggctgggcg gcgccagcgc ctaggttggc tgtgcgctga | 480 |
| cgaccctgct ccaccagtgg ccccaggcgc tcacggatag cactcacacc gcgctcggcg | 540 |
| ccctcctgtg ccccggcctt gtacaccgcc aggcgcttct gcagatcatc cgcatcccgc | 600 |
| atcaggcgct tgcgcatctt gcgcaggtgt gtggagaggc gcgaccgcag ctcctctgtg | 660 |
| ctctggccca gcatggtgtt tacctcgttg cggtactgcc cgagtcggtt gcgtagatcc | 720 |
| tccatgtcag ctcccagacg ggcctgtgcc gcctgcacct ctttagccag cctggcccgt | 780 |
| gtctcctccg ccactgggcc cagctgttcc tccagctcct ttttgtatgc ctttacttcc | 840 |
| gtcatagtgt cctccatcag taccgtcagt tcctgtgtga cttgggagct ctgcagctct | 900 |
| tcctggacct ggtcagaaag cgtctgcacc cagcgcaggt aatcccagaa gcggttcagg | 960 |
| gcctgctccc agggttggtc gctttgccct gggagctgat ctgtcacctc cagctctccc | 1020 |
| tcggccaggc atcctgtcag caatgggacc aacagcaggg cccacagagc cttcatcttc | 1080 |
| ccagttgtga ttggccagtc aagccccctg ggtgaatcgc cagcccaagc ttgtcttacc | 1140 |
| agctccttcc gaaacaactc cttagcctcc ggggtctgag caggggaccg gatcccagac | 1200 |
| ctgtccaatt at | 1212 |

<210> 5
<211> 1358
<212> DNA
<213> Mus musculus
<400> 5

| | |
|---|---|
| tttcctctgc cctgctgtga agggggagag aacaacccgc ctcgtgacag ggggctggca | 60 |
| cagcccgccc tagccctgag gagggggcgg gacaggggga gtcctataat tggaccggtc | 120 |
| tgggatccga tcccctgctc agaccctgga ggctaaggac ttgtttcgga aggagctgga | 180 |
| gagggagctg gaatttttgg cagcggatcc accccggggt gccgagatag cgaactcggc | 240 |
| aaggggagac tggccaatca caattgcgaa gatgaaggct ctgtgggccg tgctgttggt | 300 |
| cacattgctg acaggatgcc tagccgaggg agagccggag gtgacagatc agctcgagtg | 360 |
| gcaaagcaac caaccctggg agcaggccct gaaccgcttc tgggattacc tgcgctgggt | 420 |
| gcagacgctg tctgaccagg tccaggaaga gctgcagagc tcccaagtca cacaagaact | 480 |
| gacggcactg atggaggaca ctatgacgga agtaaaggct tacaaaaagg agctggagga | 540 |
| acagctgggt ccagtggcgg aggagacacg ggccaggctg ggcaaagagg tgcaggcggc | 600 |
| acaggcccga ctcggagccg acatggagga tctacgcaac cgactcgggc agtaccgcaa | 660 |
| cgaggtgcac accatgctgg gccagagcac agaggagata cgggcgcggc tctccacaca | 720 |
| cctgcgcaag atgcgcaagc gcttgatgcg ggatgccgag gatctgcaga agcgcctagc | 780 |
| tgtgtacaag gcaggggcac gcgagggcgc cgagcgcggt gtgagtgcca tccgtgagcg | 840 |
| cctggggcct ctggtggagc aaggtcgcca gcgcactgcc aacctaggcg ctggggccgc | 900 |
| ccagcctctg cgcgatcgcg cccaggcttt tggtgaccgc atccgagggc ggctggagga | 960 |
| agtgggcaac caggcccgtg accgcctaga ggaggtgcgt gagcacatgg aggaggtgcg | 1020 |
| ctccaagatg gaggaacaga cccagcaaat acgcctgcag gcggagatct tccaggcccg | 1080 |
| cctcaagggc tggttcgagc caatagtgga agacatgcat cgccagtggg caaacctgat | 1140 |
| ggagaagata caggcctctg tggctaccaa ccccatcatc accccagtgg cccaggagaa | 1200 |
| tcaatgagta tccttctcct gtcctgcaac aacatccata tccagccagg tggccctgtc | 1260 |
| tcaagcacct ctctggccct ctggtggccc ttgcttaata aagattctcc gagcacattc | 1320 |
| tgagtctctg tgagtgattc caaaaaaaaa aaaaaaaa | 1358 |

<210> 6
<211> 1358
<212> DNA
<213> Mus musculus
<400> 6

| | |
|---|---|
| tttttttttt tttttttgga atcactcaca gagactcaga atgtgctcgg agaatcttta | 60 |
| ttaagcaagg gccaccagag ggccagagag gtgcttgaga cagggccacc tggctggata | 120 |
| tggatgttgt tgcaggacag gagaaggata ctcattgatt ctcctgggcc actggggtga | 180 |
| tgatggggtt ggtagccaca gaggcctgta tcttctccat caggtttgcc cactggcgat | 240 |
| gcatgtcttc cactattggc tcgaaccagc ccttgaggcg ggcctggaag atctccgcct | 300 |
| gcaggcgtat ttgctgggtc tgttcctcca tcttggagcg cacctcctcc atgtgctcac | 360 |
| gcacctcctc taggcggtca cgggcctggt tgcccacttc ctccagccgc cctcggatgc | 420 |
| ggtcaccaaa agcctgggcg cgatcgcgca gaggctgggc ggccccagcg cctaggttgg | 480 |
| cagtgcgctg gcgaccttgc tccaccagag gccccaggcg ctcacggatg gcactcacac | 540 |
| cgcgctcggc gccctcgcgt gcccctgcct tgtacacagc taggcgcttc tgcagatcct | 600 |
| cggcatcccg catcaagcgc ttgcgcatct tgcgcaggtg tgtggagagc cgcgcccgta | 660 |
| tctcctctgt gctctggccc agcatggtgt gcacctcgtt gcggtactgc ccgagtcggt | 720 |
| tgcgtagatc ctccatgtcg gctccgagtc gggcctgtgc cgcctgcacc tctttgccca | 780 |
| gcctggcccg tgtctcctcc gccactggac ccagctgttc ctccagctcc tttttgtaag | 840 |
| cctttacttc cgtcatagtg tcctccatca gtgccgtcag ttcttgtgtg acttgggagc | 900 |
| tctgcagctc ttcctggacc tggtcagaca gcgtctgcac ccagcgcagg taatcccaga | 960 |
| agcggttcag ggcctgctcc cagggttggt tgctttgcca ctcgagctga tctgtcacct | 1020 |
| ccggctctcc ctcggctagg catcctgtca gcaatgtgac caacagcacg gcccacagag | 1080 |
| ccttcatctt cgcaattgtg attggccagt ctccccttgc cgagttcgct atctcggcac | 1140 |
| cccggggtgg atccgctgcc aaaaattcca gctccctctc cagctccttc cgaaacaagt | 1200 |
| ccttagcctc cagggtctga gcaggggatc ggatcccaga ccggtccaat tataggactc | 1260 |
| cccctgtccc gccccctcct cagggctagg gcgggctgtg ccagccccct gtcacgaggc | 1320 |
| gggttgttct ctcccccttc acagcagggc agaggaaa | 1358 |

<210> 7
<211> 1179
<212> DNA
<213> Macaca mulatta
<400> 7

| | |
|---|---|
| atgagctcag gggcctctag aaagtgtagc tgggacctcg ggaagccctg gcctccagac | 60 |
| tggccaatca caggcaggaa gatgaaggtt ctgtgggctg cgttgctggt cacattcctg | 120 |
| gcaggatgcc aggccaaggt ggagcaaccg gtggagccag agacggaacc cgagcttcgc | 180 |
| cagcaggctg aggggcagag cggccagccc tgggagctgg cactgggtcg cttttgggat | 240 |
| tacctgcgct gggtgcagac actgtctgag caggtgcagg aggagctgct cagcccccag | 300 |
| gtcacccagg aactgacgac gctgatggat gagaccatga aggagttgaa ggcctacaaa | 360 |
| tcggaactgg aggaacagct gagcccggtg gcggaggaga cgcgggcacg gctgtccaag | 420 |
| gagctacagg cggcgcaggc ccggctgggt gccgacatgg aggacgtgcg cagccgcctg | 480 |
| gtgcagtacc gcagcgaggt gcaggccatg ctgggccaga gtaccgagga gctgcgggcg | 540 |
| cgcctcgcct cccacctgcg caagctgcgc aagcggctcc tccgcgatgc tgatgacctg | 600 |
| cagaagcgcc tggcagtgta tcaggccggg gcccgcgagg gcgccgagcg cggggtcagc | 660 |
| gccatccgcg agcgcctggg acccctggtg gagcagggcc gcgtgcgggc cgccactgtg | 720 |
| ggctccctgg ccagccagcc gcttcaggag cgggcccagg ccttgggtga gcggcttcgc | 780 |
| gcacggatgg aggagatggg cagccggacc cgcgaccgcc tggacgaggt gaaggagcag | 840 |
| gtggcggagg tgcgcgccaa gctggaggaa caggcccagc agataagcct gcaggccgag | 900 |
| gccttccagg cccgcctcaa gagctggttc gagcccctgg tggaagatat gcagcgccag | 960 |
| tgggctgggc tggtggagaa ggtgcaggct gccgtgggcg ccagcaccgc ccctgtgccc | 1020 |
| agcgacaatc actgaacgcc caggcctaca gccatgcgac ccgactccac cccatgcctc | 1080 |
| ctctctccgc tcagcctgca gcgggagacc ctgtccccac cccagccgtc ctccaggggt | 1140 |
| gggccctagt ttaataaaga ttcgccaagt ttcaccgca | 1179 |

<210> 8
<211> 1179
<212> DNA
<213> Macaca mulatta
<400> 8

| | |
|---|---|
| tgcggtgaaa cttggcgaat ctttattaaa ctagggccca cccctggagg acggctgggg | 60 |
| tggggacagg gtctcccgct gcaggctgag cggagagagg aggcatgggg tggagtcggg | 120 |
| tcgcatggct gtaggcctgg gcgttcagtg attgtcgctg ggcacagggg cggtgctggc | 180 |
| gcccacggca gcctgcacct tctccaccag cccagcccac tggcgctgca tatcttccac | 240 |
| caggggctcg aaccagctct tgaggcgggc ctggaaggcc tcggcctgca ggcttatctg | 300 |
| ctgggcctgt tcctccagct tggcgcgcac ctccgccacc tgctccttca cctcgtccag | 360 |
| gcggtcgcgg gtccggctgc ccatctcctc catccgtgcg cgaagccgct cacccaaggc | 420 |
| ctgggcccgc tcctgaagcg gctggctggc cagggagccc acagtggcgg cccgcacgcg | 480 |
| gccctgctcc accaggggtc ccaggcgctc gcggatggcg ctgaccccgc gctcggcgcc | 540 |
| ctcgcgggcc ccggcctgat acactgccag gcgcttctgc aggtcatcag catcgcggag | 600 |
| gagccgcttg cgcagcttgc gcaggtggga ggcgaggcgc gcccgcagct cctcggtact | 660 |
| ctggcccagc atggcctgca cctcgctgcg gtactgcacc aggcggctgc gcacgtcctc | 720 |
| catgtcggca cccagccggg cctgcgccgc ctgtagctcc ttggacagcc gtgcccgcgt | 780 |
| ctcctccgcc accgggctca gctgttcctc cagttccgat ttgtaggcct tcaactcctt | 840 |
| catggtctca tccatcagcg tcgtcagttc ctgggtgacc tgggggctga gcagctcctc | 900 |
| ctgcacctgc tcagacagtg tctgcaccca gcgcaggtaa tcccaaaagc gacccagtgc | 960 |
| cagctcccag ggctggccgc tctgcccctc agcctgctgg cgaagctcgg gttccgtctc | 1020 |
| tggctccacc ggttgctcca ccttggcctg gcatcctgcc aggaatgtga ccagcaacgc | 1080 |
| agcccacaga accttcatct tcctgcctgt gattggccag tctggaggcc agggcttccc | 1140 |
| gaggtcccag ctacactttc tagaggcccc tgagctcat | 1179 |

<210> 9
<211> 1179
<212> DNA
<213> Macaca fascicularis
<400> 9

| | |
|---|---|
| atgagctcag gcgcctctag aaagtgtagc tgggacctcg ggaagccctg gcctccagac | 60 |
| tggccaatca caggcaggaa gatgaaggtt ctgtgggctg cgttgctggt cacattcctg | 120 |
| gcaggatgcc aggccaaggt ggagcaaccg gtggagccag agacggaacc cgagcttcgc | 180 |
| cagcaggctg aggggcagag cggccagccc tgggagctgg cactgggtcg cttttgggat | 240 |
| tacctgcgct gggtgcagac actgtctgag caggtgcagg aggagctgct cagcccccag | 300 |
| gtcacccagg aactgacgac gctgatggat gagaccatga aggagttgaa ggcctacaaa | 360 |
| tcggaactgg aggaacagct gagcccggtg gcggaggaga cgcgggcacg gctgtccaag | 420 |
| gagctgcagg cggcgcaggc ccggctgggt gccgacatgg aggacgtgcg cagccgcctg | 480 |
| gtgcagtacc gcagcgaggt gcaggccatg ctgggccaga gtaccgagga gctgcgggcg | 540 |
| cgcctcgcct cccacctgcg caagctgcgc aagcggctcc tccgcgatgc tgatgacctg | 600 |
| cagaagcgcc tggcagtgta tcaggccggg gcccgcgagg gcgccgagcg cggggtcagc | 660 |
| gccatccgcg agcgcctggg acccctggtg gagcagggcc gcgtgcgggc cgccactgtg | 720 |
| ggctccctgg ccagccagcc gcttcaggag cgggcccagg ccttgggtga gcggcttcgc | 780 |
| gcacggatgg aggagatggg cagccggacc cgcgaccgcc tggacgaggt gaaggagcag | 840 |
| gtggcggagg tgcgcgccaa gctggaggaa caggcccagc agataagcct gcaggccgag | 900 |
| gccttccagg cccgcctcaa gagctggttc gagcccctcg tggaagatat gcagcgccag | 960 |
| tgggctgggc tggtggagaa ggtgcaggct gccgtgggcg ccagcaccgc ccctgtgccc | 1020 |
| agcgacaatc actgaacgcc caggcctaca gccatgcgac ccgactccac cccatgcctc | 1080 |
| ctctctccgc tcagcctgca gcgggagacc ctgtccccgc cccagccgtc ctccaggggt | 1140 |
| gggccctagt ttaataaaga ttcgccaagt ttcaccgca | 1179 |

<210> 10
<211> 1179
<212> DNA
<213> Macaca fascicularis
<400> 10

| | |
|---|---|
| tgcggtgaaa cttggcgaat ctttattaaa ctagggccca cccctggagg acggctgggg | 60 |
| cggggacagg gtctcccgct gcaggctgag cggagagagg aggcatgggg tggagtcggg | 120 |
| tcgcatggct gtaggcctgg gcgttcagtg attgtcgctg ggcacagggg cggtgctggc | 180 |
| gcccacggca gcctgcacct tctccaccag cccagcccac tggcgctgca tatcttccac | 240 |
| gaggggctcg aaccagctct tgaggcgggc ctggaaggcc tcggcctgca ggcttatctg | 300 |
| ctgggcctgt tcctccagct tggcgcgcac ctccgccacc tgctccttca cctcgtccag | 360 |
| gcggtcgcgg gtccggctgc ccatctcctc catccgtgcg cgaagccgct cacccaaggc | 420 |
| ctgggcccgc tcctgaagcg gctggctggc cagggagccc acagtggcgg cccgcacgcg | 480 |
| gccctgctcc accaggggtc ccaggcgctc gcggatggcg ctgaccccgc gctcggcgcc | 540 |
| ctcgcgggcc ccggcctgat acactgccag gcgcttctgc aggtcatcag catcgcggag | 600 |
| gagccgcttg cgcagcttgc gcaggtggga ggcgaggcgc gcccgcagct cctcggtact | 660 |
| ctggcccagc atggcctgca cctcgctgcg gtactgcacc aggcggctgc gcacgtcctc | 720 |
| catgtcggca cccagccggg cctgcgccgc ctgcagctcc ttggacagcc gtgcccgcgt | 780 |
| ctcctccgcc accgggctca gctgttcctc cagttccgat ttgtaggcct tcaactcctt | 840 |
| catggtctca tccatcagcg tcgtcagttc ctgggtgacc tgggggctga gcagctcctc | 900 |
| ctgcacctgc tcagacagtg tctgcaccca gcgcaggtaa tcccaaaagc gacccagtgc | 960 |
| cagctcccag ggctggccgc tctgcccctc agcctgctgg cgaagctcgg gttccgtctc | 1020 |
| tggctccacc ggttgctcca ccttggcctg gcatcctgcc aggaatgtga ccagcaacgc | 1080 |
| agcccacaga accttcatct tcctgcctgt gattggccag tctggaggcc agggcttccc | 1140 |
| gaggtcccag ctacactttc tagaggcgcc tgagctcat | 1179 |

The application's sequence listing, which the Patent Office published only in electronic form, follows.

SEQUENCE LISTING (739 sequences)

SEQ ID NO: 1 - DNA, 1166 bp, Homo sapiens
  source 1..1166: mol_type = unassigned DNA
ctactcagccccagcggaggtgaaggacgtccttccccaggagccgactggccaatcacaggcaggaagatgaaggttctgtgggctgcgttgctggtcacattcctggcaggatgccaggccaaggtggagcaagcggtggagacagagccggagcccgagctgcgccagcagaccgagtggcagagcggccagcgctgggaactggcactgggtcgcttttgggattacctgcgctgggtgcagacactgtctgagcaggtgcaggaggagctgctcagctcccaggtcacccaggaactgagggcgctgatggacgagaccatgaaggagttgaaggcctacaaatcggaactggaggaacaactgaccccggtggcggaggagacgcgggcacggctgtccaaggagctgcaggcggcgcaggcccggctgggcgcggacatggaggacgtgtgcggccgcctggtgcagtaccgcggcgaggtgcaggccatgctcggccagagcaccgaggagctgcgggtgcgcctcgcctcccacctgcgcaagctgcgtaagcggctcctccgcgatgccgatgacctgcagaagcgcctggcagtgtaccaggccggggcccgcgagggcgccgagcgcggcctcagcgccatccgcgagcgcctggggcccctggtggaacagggccgcgtgcgggccgccactgtgggctccctggccggccagccgctacaggagcgggcccaggcctggggcgagcggctgcgcgcgcggatggaggagatgggcagccggacccgcgaccgcctggacgaggtgaaggagcaggtggcggaggtgcgcgccaagctggaggagcaggcccagcagatacgcctgcaggccgaggccttccaggcccgcctcaagagctggttcgagcccctggtggaagacatgcagcgccagtgggccgggctggtggagaaggtgcaggctgccgtgggcaccagcgccgcccctgtgcccagcgacaatcactgaacgccgaagcctgcagccatgcgaccccacgccaccccgtgcctcctgcctccgcgcagcctgcagcgggagaccctgtccccgccccagccgtcctcctggggtggaccctagtttaataaagattcaccaagtttcacgca

SEQ ID NO: 2 - DNA, 1166 bp, Homo sapiens
  source 1..1166: mol_type = unassigned DNA
tgcgtgaaacttggtgaatctttattaaactagggtccaccccaggaggacggctggggcggggacagggtctcccgctgcaggctgcgcggaggcaggaggcacggggtggcgtggggtcgcatggctgcaggcttcggcgttcagtgattgtcgctgggcacaggggcggcgctggtgcccacggcagcctgcaccttctccaccagcccggcccactggcgctgcatgtcttccaccaggggctcgaaccagctcttgaggcgggcctggaaggcctcggcctgcaggcgtatctgctgggcctgctcctccagcttggcgcgcacctccgccacctgctccttcacctcgtccaggcggtcgcgggtccggctgcccatctcctccatccgcgcgcgcagccgctcgccccaggcctgggcccgctcctgtagcggctggccggccagggagcccacagtggcggcccgcacgcggccctgttccaccaggggccccaggcgctcgcggatggcgctgaggccgcgctcggcgccctcgcgggccccggcctggtacactgccaggcgcttctgcaggtcatcggcatcgcggaggagccgcttacgcagcttgcgcaggtgggaggcgaggcgcacccgcagctcctcggtgctctggccgagcatggcctgcacctcgccgcggtactgcaccaggcggccgcacacgtcctccatgtccgcgcccagccgggcctgcgccgcctgcagctccttggacagccgtgcccgcgtctcctccgccaccggggtcagttgttcctccagttccgatttgtaggccttcaactccttcatggtctcgtccatcagcgccctcagttcctgggtgacctgggagctgagcagctcctcctgcacctgctcagacagtgtctgcacccagcgcaggtaatcccaaaagcgacccagtgccagttcccagcgctggccgctctgccactcggtctgctggcgcagctcgggctccggctctgtctccaccgcttgctccaccttggcctggcatcctgccaggaatgtgaccagcaacgcagcccacagaaccttcatcttcctgcctgtgattggccagtcggctcctggggaaggacgtccttcacctccgctggggctgagtag

SEQ ID NO: 3 - DNA, 1212 bp, Rattus norvegicus
  source 1..1212: mol_type = unassigned DNA
ataattggacaggtctgggatccggtcccctgctcagaccccggaggctaaggagttgtttcggaaggagctggtaagacaagcttgggctggcgattcacccagggggcttgactggccaatcacaactgggaagatgaaggctctgtgggccctgctgttggtcccattgctgacaggatgcctggccgagggagagctggaggtgacagatcagctcccagggcaaagcgaccaaccctgggagcaggccctgaaccgcttctgggattacctgcgctgggtgcagacgctttctgaccaggtccaggaagagctgcagagctcccaagtcacacaggaactgacggtactgatggaggacactatgacggaagtaaaggcatacaaaaaggagctggaggaacagctgggcccagtggcggaggagacacgggccaggctggctaaagaggtgcaggcggcacaggcccgtctgggagctgacatggaggatctacgcaaccgactcgggcagtaccgcaacgaggtaaacaccatgctgggccagagcacagaggagctgcggtcgcgcctctccacacacctgcgcaagatgcgcaagcgcctgatgcgggatgcggatgatctgcagaagcgcctggcggtgtacaaggccggggcacaggagggcgccgagcgcggtgtgagtgctatccgtgagcgcctggggccactggtggagcagggtcgtcagcgcacagccaacctaggcgctggcgccgcccagcccctgcgcgatcgcgcccaggctttgagtgaccgcatccgagggcggctggaggaagtgggcaaccaggcccgagaccgcctagaggaggtgcgtgagcagatggaggaggtgcgctccaagatggaggagcagacccagcagatacgcctgcaggccgagatcttccaggcccgcatcaagggctggttcgagccgctagtggaagacatgcagcgccagtgggcaaacctaatggagaagatacaggcctctgtggctaccaactccattgcctccaccacagtgcccctggagaatcaatgatcatccctcacctacgccctgccgcaacatccatgaccagccaggtggccctgtcccaagcaccactctggccctctggtggcccttgcttaataaagattctccaagcaaaaaaaaaaaaaaaaaaaaaaaaaaaa

SEQ ID NO: 4 - DNA, 1212 bp, Rattus norvegicus
  source 1..1212: mol_type = unassigned DNA
ttttttttttttttttttttttttttttgcttggagaatctttattaagcaagggccaccagagggccagagtggtgcttgggacagggccacctggctggtcatggatgttgcggcagggcgtaggtgagggatgatcattgattctccaggggcactgtggtggaggcaatggagttggtagccacagaggcctgtatcttctccattaggtttgcccactggcgctgcatgtcttccactagcggctcgaaccagcccttgatgcgggcctggaagatctcggcctgcaggcgtatctgctgggtctgctcctccatcttggagcgcacctcctccatctgctcacgcacctcctctaggcggtctcgggcctggttgcccacttcctccagccgccctcggatgcggtcactcaaagcctgggcgcgatcgcgcaggggctgggcggcgccagcgcctaggttggctgtgcgctgacgaccctgctccaccagtggccccaggcgctcacggatagcactcacaccgcgctcggcgccctcctgtgccccggccttgtacaccgccaggcgcttctgcagatcatccgcatcccgcatcaggcgcttgcgcatcttgcgcaggtgtgtggagaggcgcgaccgcagctcctctgtgctctggcccagcatggtgtttacctcgttgcggtactgcccgagtcggttgcgtagatcctccatgtcagctcccagacgggcctgtgccgcctgcacctctttagccagcctggcccgtgtctcctccgccactgggcccagctgttcctccagctcctttttgtatgcctttacttccgtcatagtgtcctccatcagtaccgtcagttcctgtgtgacttgggagctctgcagctcttcctggacctggtcagaaagcgtctgcacccagcgcaggtaatcccagaagcggttcagggcctgctcccagggttggtcgctttgccctgggagctgatctgtcacctccagctctccctcggccaggcatcctgtcagcaatgggaccaacagcagggcccacagagccttcatcttcccagttgtgattggccagtcaagccccctgggtgaatcgccagcccaagcttgtcttaccagctccttccgaaacaactccttagcctccggggtctgagcaggggaccggatcccagacctgtccaattat

SEQ ID NO: 5 - DNA, 1358 bp, Mus musculus
  source 1..1358: mol_type = unassigned DNA
tttcctctgccctgctgtgaagggggagagaacaacccgcctcgtgacagggggctggcacagcccgccctagccctgaggagggggcgggacagggggagtcctataattggaccggtctgggatccgatcccctgctcagaccctggaggctaaggacttgtttcggaaggagctggagagggagctggaatttttggcagcggatccaccccggggtgccgagatagcgaactcggcaaggggagactggccaatcacaattgcgaagatgaaggctctgtgggccgtgctgttggtcacattgctgacaggatgcctagccgagggagagccggaggtgacagatcagctcgagtggcaaagcaaccaaccctgggagcaggccctgaaccgcttctgggattacctgcgctgggtgcagacgctgtctgaccaggtccaggaagagctgcagagctcccaagtcacacaagaactgacggcactgatggaggacactatgacggaagtaaaggcttacaaaaaggagctggaggaacagctgggtccagtggcggaggagacacgggccaggctgggcaaagaggtgcaggcggcacaggcccgactcggagccgacatggaggatctacgcaaccgactcgggcagtaccgcaacgaggtgcacaccatgctgggccagagcacagaggagatacgggcgcggctctccacacacctgcgcaagatgcgcaagcgcttgatgcgggatgccgaggatctgcagaagcgcctagctgtgtacaaggcaggggcacgcgagggcgccgagcgcggtgtgagtgccatccgtgagcgcctggggcctctggtggagcaaggtcgccagcgcactgccaacctaggcgctggggccgcccagcctctgcgcgatcgcgcccaggcttttggtgaccgcatccgagggcggctggaggaagtgggcaaccaggcccgtgaccgcctagaggaggtgcgtgagcacatggaggaggtgcgctccaagatggaggaacagacccagcaaatacgcctgcaggcggagatcttccaggcccgcctcaagggctggttcgagccaatagtggaagacatgcatcgccagtgggcaaacctgatggagaagatacaggcctctgtggctaccaaccccatcatcaccccagtggcccaggagaatcaatgagtatccttctcctgtcctgcaacaacatccatatccagccaggtggccctgtctcaagcacctctctggccctctggtggcccttgcttaataaagattctccgagcacattctgagtctctgtgagtgattccaaaaaaaaaaaaaaaaa

SEQ ID NO: 6 - DNA, 1358 bp, Mus musculus
  source 1..1358: mol_type = unassigned DNA
tttttttttttttttttggaatcactcacagagactcagaatgtgctcggagaatctttattaagcaagggccaccagagggccagagaggtgcttgagacagggccacctggctggatatggatgttgttgcaggacaggagaaggatactcattgattctcctgggccactggggtgatgatggggttggtagccacagaggcctgtatcttctccatcaggtttgcccactggcgatgcatgtcttccactattggctcgaaccagcccttgaggcgggcctggaagatctccgcctgcaggcgtatttgctgggtctgttcctccatcttggagcgcacctcctccatgtgctcacgcacctcctctaggcggtcacgggcctggttgcccacttcctccagccgccctcggatgcggtcaccaaaagcctgggcgcgatcgcgcagaggctgggcggccccagcgcctaggttggcagtgcgctggcgaccttgctccaccagaggccccaggcgctcacggatggcactcacaccgcgctcggcgccctcgcgtgcccctgccttgtacacagctaggcgcttctgcagatcctcggcatcccgcatcaagcgcttgcgcatcttgcgcaggtgtgtggagagccgcgcccgtatctcctctgtgctctggcccagcatggtgtgcacctcgttgcggtactgcccgagtcggttgcgtagatcctccatgtcggctccgagtcgggcctgtgccgcctgcacctctttgcccagcctggcccgtgtctcctccgccactggacccagctgttcctccagctcctttttgtaagcctttacttccgtcatagtgtcctccatcagtgccgtcagttcttgtgtgacttgggagctctgcagctcttcctggacctggtcagacagcgtctgcacccagcgcaggtaatcccagaagcggttcagggcctgctcccagggttggttgctttgccactcgagctgatctgtcacctccggctctccctcggctaggcatcctgtcagcaatgtgaccaacagcacggcccacagagccttcatcttcgcaattgtgattggccagtctccccttgccgagttcgctatctcggcaccccggggtggatccgctgccaaaaattccagctccctctccagctccttccgaaacaagtccttagcctccagggtctgagcaggggatcggatcccagaccggtccaattataggactccccctgtcccgccccctcctcagggctagggcgggctgtgccagccccctgtcacgaggcgggttgttctctcccccttcacagcagggcagaggaaa

SEQ ID NO: 7 - DNA, 1179 bp, Macaca mulatta
  source 1..1179: mol_type = unassigned DNA
atgagctcaggggcctctagaaagtgtagctgggacctcgggaagccctggcctccagactggccaatcacaggcaggaagatgaaggttctgtgggctgcgttgctggtcacattcctggcaggatgccaggccaaggtggagcaaccggtggagccagagacggaacccgagcttcgccagcaggctgaggggcagagcggccagccctgggagctggcactgggtcgcttttgggattacctgcgctgggtgcagacactgtctgagcaggtgcaggaggagctgctcagcccccaggtcacccaggaactgacgacgctgatggatgagaccatgaaggagttgaaggcctacaaatcggaactggaggaacagctgagcccggtggcggaggagacgcgggcacggctgtccaaggagctacaggcggcgcaggcccggctgggtgccgacatggaggacgtgcgcagccgcctggtgcagtaccgcagcgaggtgcaggccatgctgggccagagtaccgaggagctgcgggcgcgcctcgcctcccacctgcgcaagctgcgcaagcggctcctccgcgatgctgatgacctgcagaagcgcctggcagtgtatcaggccggggcccgcgagggcgccgagcgcggggtcagcgccatccgcgagcgcctgggacccctggtggagcagggccgcgtgcgggccgccactgtgggctccctggccagccagccgcttcaggagcgggcccaggccttgggtgagcggcttcgcgcacggatggaggagatgggcagccggacccgcgaccgcctggacgaggtgaaggagcaggtggcggaggtgcgcgccaagctggaggaacaggcccagcagataagcctgcaggccgaggccttccaggcccgcctcaagagctggttcgagcccctggtggaagatatgcagcgccagtgggctgggctggtggagaaggtgcaggctgccgtgggcgccagcaccgcccctgtgcccagcgacaatcactgaacgcccaggcctacagccatgcgacccgactccaccccatgcctcctctctccgctcagcctgcagcgggagaccctgtccccaccccagccgtcctccaggggtgggccctagtttaataaagattcgccaagtttcaccgca

SEQ ID NO: 8 - DNA, 1179 bp, Macaca mulatta
  source 1..1179: mol_type = unassigned DNA
tgcggtgaaacttggcgaatctttattaaactagggcccacccctggaggacggctggggtggggacagggtctcccgctgcaggctgagcggagagaggaggcatggggtggagtcgggtcgcatggctgtaggcctgggcgttcagtgattgtcgctgggcacaggggcggtgctggcgcccacggcagcctgcaccttctccaccagcccagcccactggcgctgcatatcttccaccaggggctcgaaccagctcttgaggcgggcctggaaggcctcggcctgcaggcttatctgctgggcctgttcctccagcttggcgcgcacctccgccacctgctccttcacctcgtccaggcggtcgcgggtccggctgcccatctcctccatccgtgcgcgaagccgctcacccaaggcctgggcccgctcctgaagcggctggctggccagggagcccacagtggcggcccgcacgcggccctgctccaccaggggtcccaggcgctcgcggatggcgctgaccccgcgctcggcgccctcgcgggccccggcctgatacactgccaggcgcttctgcaggtcatcagcatcgcggaggagccgcttgcgcagcttgcgcaggtgggaggcgaggcgcgcccgcagctcctcggtactctggcccagcatggcctgcacctcgctgcggtactgcaccaggcggctgcgcacgtcctccatgtcggcacccagccgggcctgcgccgcctgtagctccttggacagccgtgcccgcgtctcctccgccaccgggctcagctgttcctccagttccgatttgtaggccttcaactccttcatggtctcatccatcagcgtcgtcagttcctgggtgacctgggggctgagcagctcctcctgcacctgctcagacagtgtctgcacccagcgcaggtaatcccaaaagcgacccagtgccagctcccagggctggccgctctgcccctcagcctgctggcgaagctcgggttccgtctctggctccaccggttgctccaccttggcctggcatcctgccaggaatgtgaccagcaacgcagcccacagaaccttcatcttcctgcctgtgattggccagtctggaggccagggcttcccgaggtcccagctacactttctagaggcccctgagctcat

SEQ ID NO: 9 - DNA, 1179 bp, Macaca fascicularis
  source 1..1179: mol_type = unassigned DNA
atgagctcaggcgcctctagaaagtgtagctgggacctcgggaagccctggcctccagactggccaatcacaggcaggaagatgaaggttctgtgggctgcgttgctggtcacattcctggcaggatgccaggccaaggtggagcaaccggtggagccagagacggaacccgagcttcgccagcaggctgaggggcagagcggccagccctgggagctggcactgggtcgcttttgggattacctgcgctgggtgcagacactgtctgagcaggtgcaggaggagctgctcagcccccaggtcacccaggaactgacgacgctgatggatgagaccatgaaggagttgaaggcctacaaatcggaactggaggaacagctgagcccggtggcggaggagacgcgggcacggctgtccaaggagctgcaggcggcgcaggcccggctgggtgccgacatggaggacgtgcgcagccgcctggtgcagtaccgcagcgaggtgcaggccatgctgggccagagtaccgaggagctgcgggcgcgcctcgcctcccacctgcgcaagctgcgcaagcggctcctccgcgatgctgatgacctgcagaagcgcctggcagtgtatcaggccggggcccgcgagggcgccgagcgcggggtcagcgccatccgcgagcgcctgggacccctggtggagcagggccgcgtgcgggccgccactgtgggctccctggccagccagccgcttcaggagcgggcccaggccttgggtgagcggcttcgcgcacggatggaggagatgggcagccggacccgcgaccgcctggacgaggtgaaggagcaggtggcggaggtgcgcgccaagctggaggaacaggcccagcagataagcctgcaggccgaggccttccaggcccgcctcaagagctggttcgagcccctcgtggaagatatgcagcgccagtgggctgggctggtggagaaggtgcaggctgccgtgggcgccagcaccgcccctgtgcccagcgacaatcactgaacgcccaggcctacagccatgcgacccgactccaccccatgcctcctctctccgctcagcctgcagcgggagaccctgtccccgccccagccgtcctccaggggtgggccctagtttaataaagattcgccaagtttcaccgca

SEQ ID NO: 10 - DNA, 1179 bp, Macaca fascicularis
  source 1..1179: mol_type = unassigned DNA
tgcggtgaaacttggcgaatctttattaaactagggcccacccctggaggacggctggggcggggacagggtctcccgctgcaggctgagcggagagaggaggcatggggtggagtcgggtcgcatggctgtaggcctgggcgttcagtgattgtcgctgggcacaggggcggtgctggcgcccacggcagcctgcaccttctccaccagcccagcccactggcgctgcatatcttccacgaggggctcgaaccagctcttgaggcgggcctggaaggcctcggcctgcaggcttatctgctgggcctgttcctccagcttggcgcgcacctccgccacctgctccttcacctcgtccaggcggtcgcgggtccggctgcccatctcctccatccgtgcgcgaagccgctcacccaaggcctgggcccgctcctgaagcggctggctggccagggagcccacagtggcggcccgcacgcggccctgctccaccaggggtcccaggcgctcgcggatggcgctgaccccgcgctcggcgccctcgcgggccccggcctgatacactgccaggcgcttctgcaggtcatcagcatcgcggaggagccgcttgcgcagcttgcgcaggtgggaggcgaggcgcgcccgcagctcctcggtactctggcccagcatggcctgcacctcgctgcggtactgcaccaggcggctgcgcacgtcctccatgtcggcacccagccgggcctgcgccgcctgcagctccttggacagccgtgcccgcgtctcctccgccaccgggctcagctgttcctccagttccgatttgtaggccttcaactccttcatggtctcatccatcagcgtcgtcagttcctgggtgacctgggggctgagcagctcctcctgcacctgctcagacagtgtctgcacccagcgcaggtaatcccaaaagcgacccagtgccagctcccagggctggccgctctgcccctcagcctgctggcgaagctcgggttccgtctctggctccaccggttgctccaccttggcctggcatcctgccaggaatgtgaccagcaacgcagcccacagaaccttcatcttcctgcctgtgattggccagtctggaggccagggcttcccgaggtcccagctacactttctagaggcgcctgagctcat

SEQ ID NO: 11 - protein, 16 aa, unidentified
  source 1..16: note = Description of Unknown: RFGF peptide
AAVALLPAVLLALLAP

SEQ ID NO: 12 - protein, 11 aa, unidentified
  source 1..11: note = Description of Unknown: RFGF analogue peptide
AALLPVLLAAP

SEQ ID NO: 13 - protein, 13 aa, Human immunodeficiency virus
GRKKRRQRRRPPQ

SEQ ID NO: 14 - protein, 16 aa, Drosophila sp.
RQIKIWFQNRRMKWKK

SEQ ID NO: 15 - RNA, 21 nt, synthetic construct
  source 1..21: mol_type = other RNA; note = Description of Artificial Sequence: Synthetic oligonucleotide
ggccaatcacaggcaggaagt

SEQ ID NO: 16 - RNA, 21 nt, synthetic construct
  source 1..21: mol_type = other RNA; note = Description of Artificial Sequence: Synthetic oligonucleotide
caggcaggaagatgaaggttt

SEQ ID NO: 17 - RNA, 21 nt, synthetic construct
  source 1..21: mol_type = other RNA; note = Description of Artificial Sequence: Synthetic oligonucleotide
aggaagatgaaggttctgtgt

SEQ ID NO: 18 - RNA, 21 nt, synthetic construct
  source 1..21: mol_type = other RNA; note = Description of Artificial Sequence: Synthetic oligonucleotide
atgaaggttctgtgggctgct

SEQ ID NO: 19 - RNA, 21 nt, synthetic construct
  source 1..21: mol_type = other RNA; note = Description of Artificial Sequence: Synthetic oligonucleotide
ttctgtgggctgcgttgctgt

SEQ ID NO: 20 - RNA, 21 nt, synthetic construct
  source 1..21: mol_type = other RNA; note = Description of Artificial Sequence: Synthetic oligonucleotide
tgggctgcgttgctggtcact

SEQ ID NO: 21 - RNA, 21 nt, synthetic construct
  source 1..21: mol_type = other RNA; note = Description of Artificial Sequence: Synthetic oligonucleotide
gcgttgctggtcacattcctt

SEQ ID NO: 22 - RNA, 21 nt, synthetic construct
  source 1..21: mol_type = other RNA; note = Description of Artificial Sequence: Synthetic oligonucleotide
gctggtcacattcctggcagt

SEQ ID NO: 23 - RNA, 21 nt, synthetic construct
  source 1..21: mol_type = other RNA; note = Description of Artificial Sequence: Synthetic oligonucleotide
tcacattcctggcaggatgct

SEQ ID NO: 24 - RNA, 21 nt, synthetic construct
  source 1..21: mol_type = other RNA; note = Description of Artificial Sequence: Synthetic oligonucleotide
tggcaggatgccaggccaagt

SEQ ID NO: 25 - RNA, 21 nt, synthetic construct
  source 1..21: mol_type = other RNA; note = Description of Artificial Sequence: Synthetic oligonucleotide
caggccaaggtggagcaagct

SEQ ID NO: 26 - RNA, 21 nt, synthetic construct
  source 1..21: mol_type = other RNA; note = Description of Artificial Sequence: Synthetic oligonucleotide
aaggtggagcaagcggtggat

SEQ ID NO: 27 - RNA, 21 nt, synthetic construct
  source 1..21: mol_type = other RNA; note = Description of Artificial Sequence: Synthetic oligonucleotide
caagcggtggagacagagcct

SEQ ID NO: 28 - RNA, 21 nt, synthetic construct
  source 1..21: mol_type = other RNA; note = Description of Artificial Sequence: Synthetic oligonucleotide
ggtggagacagagccggagct

SEQ ID NO: 29 - RNA, 21 nt, synthetic construct
  source 1..21: mol_type = other RNA; note = Description of Artificial Sequence: Synthetic oligonucleotide
cccgagctgcgccagcagact

SEQ ID NO: 30 - RNA, 21 nt, synthetic construct
  source 1..21: mol_type = other RNA; note = Description of Artificial Sequence: Synthetic oligonucleotide
gctgcgccagcagaccgagtt

SEQ ID NO: 31 - RNA, 21 nt, synthetic construct
  source 1..21: mol_type = other RNA; note = Description of Artificial Sequence: Synthetic oligonucleotide
ccagcagaccgagtggcagat

SEQ ID NO: 32 - RNA, 21 nt, synthetic construct
  source 1..21: mol_type = other RNA; note = Description of Artificial Sequence: Synthetic oligonucleotide
cagcgctgggaactggcactt

SEQ ID NO: 33 - RNA, 21 nt, synthetic construct
  source 1..21: mol_type = other RNA; note = Description of Artificial Sequence: Synthetic oligonucleotide
ctgggaactggcactgggtct

SEQ ID NO: 34 - RNA, 21 nt, synthetic construct
  source 1..21: mol_type = other RNA; note = Description of Artificial Sequence: Synthetic oligonucleotide
aactggcactgggtcgctttt

SEQ ID NO: 35 - RNA, 21 nt, synthetic construct
  source 1..21: mol_type = other RNA; note = Description of Artificial Sequence: Synthetic oligonucleotide
cactgggtcgcttttgggatt

SEQ ID NO: 36 - RNA, 21 nt, synthetic construct
  source 1..21: mol_type = other RNA; note = Description of Artificial Sequence: Synthetic oligonucleotide
gtcgcttttgggattacctgt

SEQ ID NO: 37 - RNA, 21 nt, synthetic construct
  source 1..21: mol_type = other RNA; note = Description of Artificial Sequence: Synthetic oligonucleotide
ttttgggattacctgcgctgt

SEQ ID NO: 38 - RNA, 21 nt, synthetic construct
  source 1..21: mol_type = other RNA; note = Description of Artificial Sequence: Synthetic oligonucleotide
ctgcgctgggtgcagacactt

SEQ ID NO: 39 - RNA, 21 nt, synthetic construct
  source 1..21: mol_type = other RNA; note = Description of Artificial Sequence: Synthetic oligonucleotide
tgggtgcagacactgtctgat

SEQ ID NO: 40 - RNA, 21 nt, synthetic construct
  source 1..21: mol_type = other RNA; note = Description of Artificial Sequence: Synthetic oligonucleotide
cagacactgtctgagcaggtt

SEQ ID NO: 41 - RNA, 21 nt, synthetic construct
  source 1..21: mol_type = other RNA; note = Description of Artificial Sequence: Synthetic oligonucleotide
caggaggagctgctcagctct

SEQ ID NO: 42 - RNA, 21 nt, synthetic construct
  source 1..21: mol_type = other RNA; note = Description of Artificial Sequence: Synthetic oligonucleotide
ctgctcagctcccaggtcact

SEQ ID NO: 43 - RNA, 21 nt, synthetic construct
  source 1..21: mol_type = other RNA; note = Description of Artificial Sequence: Synthetic oligonucleotide
tcccaggtcacccaggaactt

SEQ ID NO: 44 - RNA, 21 nt, synthetic construct
  source 1..21: mol_type = other RNA; note = Description of Artificial Sequence: Synthetic oligonucleotide
acccaggaactgagggcgctt

SEQ ID NO: 45 - RNA, 21 nt, synthetic construct
  source 1..21: mol_type = other RNA; note = Description of Artificial Sequence: Synthetic oligonucleotide
tgagggcgctgatggacgagt

SEQ ID NO: 46 - RNA, 21 nt, synthetic construct
  source 1..21: mol_type = other RNA; note = Description of Artificial Sequence: Synthetic oligonucleotide
gcgctgatggacgagaccatt

SEQ ID NO: 47 - RNA, 21 nt, synthetic construct
  source 1..21: mol_type = other RNA; note = Description of Artificial Sequence: Synthetic oligonucleotide
gacgagaccatgaaggagttt

SEQ ID NO: 48 - RNA, 21 nt, synthetic construct
  source 1..21: mol_type = other RNA; note = Description of Artificial Sequence: Synthetic oligonucleotide
accatgaaggagttgaaggct

SEQ ID NO: 49 - RNA, 21 nt, synthetic construct
  source 1..21: mol_type = other RNA; note = Description of Artificial Sequence: Synthetic oligonucleotide
ggagttgaaggcctacaaatt

SEQ ID NO: 50 - RNA, 21 nt, synthetic construct
  source 1..21: mol_type = other RNA; note = Description of Artificial Sequence: Synthetic oligonucleotide
aaggcctacaaatcggaactt

SEQ ID NO: 51 - RNA, 21 nt, synthetic construct
  source 1..21: mol_type = other RNA; note = Description of Artificial Sequence: Synthetic oligonucleotide
acaaatcggaactggaggaat

SEQ ID NO: 52 - RNA, 21 nt, synthetic construct
  source 1..21: mol_type = other RNA; note = Description of Artificial Sequence: Synthetic oligonucleotide
tcggaactggaggaacaactt

SEQ ID NO: 53 - RNA, 21 nt, synthetic construct
  source 1..21: mol_type = other RNA; note = Description of Artificial Sequence: Synthetic oligonucleotide
gaggaacaactgaccccggtt

SEQ ID NO: 54 - RNA, 21 nt, synthetic construct
  source 1..21: mol_type = other RNA; note = Description of Artificial Sequence: Synthetic oligonucleotide
cgcgggcacggctgtccaagt

SEQ ID NO: 55 - RNA, 21 nt, synthetic construct
  source 1..21: mol_type = other RNA; note = Description of Artificial Sequence: Synthetic oligonucleotide
gcacggctgtccaaggagctt

SEQ ID NO: 56 - RNA, 21 nt, synthetic construct
  source 1..21: mol_type = other RNA; note = Description of Artificial Sequence: Synthetic oligonucleotide
gctgtccaaggagctgcaggt

SEQ ID NO: 57 - RNA, 21 nt, synthetic construct
  source 1..21: mol_type = other RNA; note = Description of Artificial Sequence: Synthetic oligonucleotide
gcccggctgggcgcggacatt

SEQ ID NO: 58 - RNA, 21 nt, synthetic construct
  source 1..21: mol_type = other RNA; note = Description of Artificial Sequence: Synthetic oligonucleotide
ctgggcgcggacatggaggat

SEQ ID NO: 59 - RNA, 21 nt, synthetic construct
  source 1..21: mol_type = other RNA; note = Description of Artificial Sequence: Synthetic oligonucleotide
cgcggacatggaggacgtgct

SEQ ID NO: 60 - RNA, 21 nt, synthetic construct
  source 1..21: mol_type = other RNA; note = Description of Artificial Sequence: Synthetic oligonucleotide
gcggacatggaggacgtgtgt

SEQ ID NO: 61 - RNA, 21 nt, synthetic construct
  source 1..21: mol_type = other RNA; note = Description of Artificial Sequence: Synthetic oligonucleotide
gcggacatggaggacgtgcgt

SEQ ID NO: 62 - RNA, 21 nt, synthetic construct
  source 1..21: mol_type = other RNA; note = Description of Artificial Sequence: Synthetic oligonucleotide
cggacatggaggacgtgcgct

SEQ ID NO: 63 - RNA, 21 nt, synthetic construct
  source 1..21: mol_type = other RNA; note = Description of Artificial Sequence: Synthetic oligonucleotide
ggacatggaggacgtgcgcgt

SEQ ID NO: 64 - RNA, 21 nt, synthetic construct
  source 1..21: mol_type = other RNA; note = Description of Artificial Sequence: Synthetic oligonucleotide
gacatggaggacgtgcgcggt

SEQ ID NO: 65 - RNA, 21 nt, synthetic construct
  source 1..21: mol_type = other RNA; note = Description of Artificial Sequence: Synthetic oligonucleotide
acatggaggacgtgcgcggct

SEQ ID NO: 66 - RNA, 21 nt, synthetic construct
  source 1..21: mol_type = other RNA; note = Description of Artificial Sequence: Synthetic oligonucleotide
catggaggacgtgcgcggcct

SEQ ID NO: 67 - RNA, 21 nt, synthetic construct
  source 1..21: mol_type = other RNA; note = Description of Artificial Sequence: Synthetic oligonucleotide
atggaggacgtgcgcggccgt

SEQ ID NO: 68 - RNA, 21 nt, synthetic construct
  source 1..21: mol_type = other RNA; note = Description of Artificial Sequence: Synthetic oligonucleotide
tggaggacgtgcgcggccgct

SEQ ID NO: 69 - RNA, 21 nt, synthetic construct
  source 1..21: mol_type = other RNA; note = Description of Artificial Sequence: Synthetic oligonucleotide
ggaggacgtgcgcggccgcct

SEQ ID NO: 70 - RNA, 21 nt, synthetic construct
  source 1..21: mol_type = other RNA; note = Description of Artificial Sequence: Synthetic oligonucleotide
gaggacgtgcgcggccgcctt

SEQ ID NO: 71 - RNA, 21 nt, synthetic construct
  source 1..21: mol_type = other RNA; note = Description of Artificial Sequence: Synthetic oligonucleotide
aggacgtgcgcggccgcctgt

SEQ ID NO: 72 - RNA, 21 nt, synthetic construct
  source 1..21: mol_type = other RNA; note = Description of Artificial Sequence: Synthetic oligonucleotide
ggacgtgcgcggccgcctggt

SEQ ID NO: 73 - RNA, 21 nt, synthetic construct
  source 1..21: mol_type = other RNA; note = Description of Artificial Sequence: Synthetic oligonucleotide
gacgtgcgcggccgcctggtt

SEQ ID NO: 74 - RNA, 21 nt, synthetic construct
  source 1..21: mol_type = other RNA; note = Description of Artificial Sequence: Synthetic oligonucleotide
acgtgcgcggccgcctggtgt

SEQ ID NO: 75 - RNA, 21 nt, synthetic construct
  source 1..21: mol_type = other RNA; note = Description of Artificial Sequence: Synthetic oligonucleotide
cgtgcgcggccgcctggtgct

SEQ ID NO: 76 - RNA, 21 nt, synthetic construct
  source 1..21: mol_type = other RNA; note = Description of Artificial Sequence: Synthetic oligonucleotide
gtgcgcggccgcctggtgcat

SEQ ID NO: 77 - RNA, 21 nt, synthetic construct
  source 1..21: mol_type = other RNA; note = Description of Artificial Sequence: Synthetic oligonucleotide
gcggccgcctggtgcagtact

SEQ ID NO: 78 - RNA, 21 nt, synthetic construct
  source 1..21: mol_type = other RNA; note = Description of Artificial Sequence: Synthetic oligonucleotide
cgcctggtgcagtaccgcggt

SEQ ID NO: 79 - RNA, 21 nt, synthetic construct
  source 1..21: mol_type = other RNA; note = Description of Artificial Sequence: Synthetic oligonucleotide
gaggtgcaggccatgctcggt

SEQ ID NO: 80 - RNA, 21 nt, synthetic construct
  source 1..21: mol_type = other RNA; note = Description of Artificial Sequence: Synthetic oligonucleotide
gccatgctcggccagagcact

SEQ ID NO: 81 - RNA, 21 nt, synthetic construct
  source 1..21: mol_type = other RNA; note = Description of Artificial Sequence: Synthetic oligonucleotide
ggccagagcaccgaggagctt

SEQ ID NO: 82 - RNA, 21 nt, synthetic construct
  source 1..21: mol_type = other RNA; note = Description of Artificial Sequence: Synthetic oligonucleotide
gctgcgggtgcgcctcgcctt

SEQ ID NO: 83 - RNA, 21 nt, synthetic construct
  source 1..21: mol_type = other RNA; note = Description of Artificial Sequence: Synthetic oligonucleotide
gtgcgcctcgcctcccacctt

SEQ ID NO: 84 - RNA, 21 nt, synthetic construct
  source 1..21: mol_type = other RNA; note = Description of Artificial Sequence: Synthetic oligonucleotide
cgcctcccacctgcgcaagct

SEQ ID NO: 85 - RNA, 21 nt, synthetic construct
  source 1..21: mol_type = other RNA; note = Description of Artificial Sequence: Synthetic oligonucleotide
cccacctgcgcaagctgcgtt

SEQ ID NO: 86 - RNA, 21 nt, synthetic construct
  source 1..21: mol_type = other RNA; note = Description of Artificial Sequence: Synthetic oligonucleotide
ctgcgcaagctgcgtaagcgt

SEQ ID NO: 87 - RNA, 21 nt, synthetic construct
  source 1..21: mol_type = other RNA; note = Description of Artificial Sequence: Synthetic oligonucleotide
aagctgcgtaagcggctcctt

SEQ ID NO: 88 - RNA, 21 nt, synthetic construct
  source 1..21: mol_type = other RNA; note = Description of Artificial Sequence: Synthetic oligonucleotide
gtaagcggctcctccgcgatt

SEQ ID NO: 89 - RNA, 21 nt, synthetic construct
  source 1..21: mol_type = other RNA; note = Description of Artificial Sequence: Synthetic oligonucleotide
ggctcctccgcgatgccgatt

SEQ ID NO: 90 - RNA, 21 nt, synthetic construct
  source 1..21: mol_type = other RNA; note = Description of Artificial Sequence: Synthetic oligonucleotide
ctccgcgatgccgatgacctt

SEQ ID NO: 91 - RNA, 21 nt, synthetic construct
  source 1..21: mol_type = other RNA; note = Description of Artificial Sequence: Synthetic oligonucleotide
gatgccgatgacctgcagaat

SEQ ID NO: 92 - RNA, 21 nt, synthetic construct
  source 1..21: mol_type = other RNA; note = Description of Artificial Sequence: Synthetic oligonucleotide
gatgacctgcagaagcgcctt

SEQ ID NO: 93 - RNA, 21 nt, synthetic construct
  source 1..21: mol_type = other RNA; note = Description of Artificial Sequence: Synthetic oligonucleotide
ctgcagaagcgcctggcagtt

SEQ ID NO: 94 - RNA, 21 nt, synthetic construct
  source 1..21: mol_type = other RNA; note = Description of Artificial Sequence: Synthetic oligonucleotide
aagcgcctggcagtgtaccat

SEQ ID NO: 95 - RNA, 21 nt, synthetic construct
  source 1..21: mol_type = other RNA; note = Description of Artificial Sequence: Synthetic oligonucleotide
ctggcagtgtaccaggccggt

SEQ ID NO: 96 - RNA, 21 nt, synthetic construct
  source 1..21: mol_type = other RNA; note = Description of Artificial Sequence: Synthetic oligonucleotide
gagcgcggcctcagcgccatt

SEQ ID NO: 97 - RNA, 21 nt, synthetic construct
  source 1..21: mol_type = other RNA; note = Description of Artificial Sequence: Synthetic oligonucleotide
cggcctcagcgccatccgcgt

SEQ ID NO: 98 - RNA, 21 nt, synthetic construct
  source 1..21: mol_type = other RNA; note = Description of Artificial Sequence: Synthetic oligonucleotide
agcgccatccgcgagcgcctt

SEQ ID NO: 99 - RNA, 21 nt, synthetic construct
  source 1..21: mol_type = other RNA; note = Description of Artificial Sequence: Synthetic oligonucleotide
tggggcccctggtggaacagt

SEQ ID NO: 100 - RNA, 21 nt, synthetic construct
  source 1..21: mol_type = other RNA; note = Description of Artificial Sequence: Synthetic oligonucleotide
cccctggtggaacagggccgt

SEQ ID NO: 101 - RNA, 21 nt, synthetic construct
  source 1..21: mol_type = other RNA; note = Description of Artificial Sequence: Synthetic oligonucleotide
cgcgtgcgggccgccactgtt

SEQ ID NO: 102 - RNA, 21 nt, synthetic construct
  source 1..21: mol_type = other RNA; note = Description of Artificial Sequence: Synthetic oligonucleotide
gccgccactgtgggctccctt

SEQ ID NO: 103 - RNA, 21 nt, synthetic construct
  source 1..21: mol_type = other RNA; note = Description of Artificial Sequence: Synthetic oligonucleotide
cctggccggccagccgctact

SEQ ID NO: 104 - RNA, 21 nt, synthetic construct
  source 1..21: mol_type = other RNA; note = Description of Artificial Sequence: Synthetic oligonucleotide
ggccagccgctacaggagcgt

SEQ ID NO: 105 - RNA, 21 nt, synthetic construct
  source 1..21: mol_type = other RNA; note = Description of Artificial Sequence: Synthetic oligonucleotide
gccgctacaggagcgggccct

SEQ ID NO: 106 - RNA, 21 nt, synthetic construct
  source 1..21: mol_type = other RNA; note = Description of Artificial Sequence: Synthetic oligonucleotide
gcgcggatggaggagatgggt

SEQ ID NO: 107 - RNA, 21 nt, synthetic construct
  source 1..21: mol_type = other RNA; note = Description of Artificial Sequence: Synthetic oligonucleotide
cgcgaccgcctggacgaggtt

SEQ ID NO: 108 - RNA, 21 nt, synthetic construct
  source 1..21: mol_type = other RNA; note = Description of Artificial Sequence: Synthetic oligonucleotide
gcctggacgaggtgaaggagt

SEQ ID NO: 109 - RNA, 21 nt, synthetic construct
  source 1..21: mol_type = other RNA; note = Description of Artificial Sequence: Synthetic oligonucleotide
gacgaggtgaaggagcaggtt

SEQ ID NO: 110 - RNA, 21 nt, synthetic construct
  source 1..21: mol_type = other RNA; note = Description of Artificial Sequence: Synthetic oligonucleotide
ggaggtgcgcgccaagctggt

SEQ ID NO: 111 - RNA, 21 nt, synthetic construct
  source 1..21: mol_type = other RNA; note = Description of Artificial Sequence: Synthetic oligonucleotide
cgcgccaagctggaggagcat

SEQ ID NO: 112 - RNA, 21 nt, synthetic construct
  source 1..21: mol_type = other RNA; note = Description of Artificial Sequence: Synthetic oligonucleotide
caggcccagcagatacgcctt

SEQ ID NO: 113 - RNA, 21 nt, synthetic construct
  source 1..21: mol_type = other RNA; note = Description of Artificial Sequence: Synthetic oligonucleotide
ccagcagatacgcctgcaggt

SEQ ID NO: 114 - RNA, 21 nt, synthetic construct
  source 1..21: mol_type = other RNA; note = Description of Artificial Sequence: Synthetic oligonucleotide
cgcctgcaggccgaggccttt

SEQ ID NO: 115 - RNA, 21 nt, synthetic construct
  source 1..21: mol_type = other RNA; note = Description of Artificial Sequence: Synthetic oligonucleotide
gcaggccgaggccttccaggt

SEQ ID NO: 116 - RNA, 21 nt, synthetic construct
  source 1..21: mol_type = other RNA; note = Description of Artificial Sequence: Synthetic oligonucleotide
ccgaggccttccaggcccgct

SEQ ID NO: 117 - RNA, 21 nt, synthetic construct
  source 1..21: mol_type = other RNA; note = Description of Artificial Sequence: Synthetic oligonucleotide
gccttccaggcccgcctcaat

SEQ ID NO: 118 - RNA, 21 nt, synthetic construct
  source 1..21: mol_type = other RNA; note = Description of Artificial Sequence: Synthetic oligonucleotide
ccaggcccgcctcaagagctt

SEQ ID NO: 119 - RNA, 21 nt, synthetic construct
  source 1..21: mol_type = other RNA; note = Description of Artificial Sequence: Synthetic oligonucleotide
ccgcctcaagagctggttcgt

SEQ ID NO: 120 - RNA, 21 nt, synthetic construct
  source 1..21: mol_type = other RNA; note = Description of Artificial Sequence: Synthetic oligonucleotide
caagagctggttcgagcccct

SEQ ID NO: 121 - RNA, 21 nt, synthetic construct
  source 1..21: mol_type = other RNA; note = Description of Artificial Sequence: Synthetic oligonucleotide
agcccctggtggaagacatgt

SEQ ID NO: 122 - RNA, 21 nt, synthetic construct
  source 1..21: mol_type = other RNA; note = Description of Artificial Sequence: Synthetic oligonucleotide
ctggtggaagacatgcagcgt

SEQ ID NO: 123 - RNA, 21 nt, synthetic construct
  source 1..21: mol_type = other RNA; note = Description of Artificial Sequence: Synthetic oligonucleotide
ggaagacatgcagcgccagtt

SEQ ID NO: 124 - RNA, 21 nt, synthetic construct
  source 1..21: mol_type = other RNA; note = Description of Artificial Sequence: Synthetic oligonucleotide
gccgggctggtggagaaggtt

SEQ ID NO: 125 - RNA, 21 nt, synthetic construct
  source 1..21: mol_type = other RNA; note = Description of Artificial Sequence: Synthetic oligonucleotide
gctggtggagaaggtgcaggt

SEQ ID NO: 126 - RNA, 21 nt, synthetic construct
  source 1..21: mol_type = other RNA; note = Description of Artificial Sequence: Synthetic oligonucleotide
accagcgccgcccctgtgcct

SEQ ID NO: 127 - RNA, 21 nt, synthetic construct
  source 1..21: mol_type = other RNA; note = Description of Artificial Sequence: Synthetic oligonucleotide
gcccctgtgcccagcgacaat

SEQ ID NO: 128 - RNA, 21 nt, synthetic construct
  source 1..21: mol_type = other RNA; note = Description of Artificial Sequence: Synthetic oligonucleotide
tgtgcccagcgacaatcactt

SEQ ID NO: 129 - RNA, 21 nt, synthetic construct
  source 1..21: mol_type = other RNA; note = Description of Artificial Sequence: Synthetic oligonucleotide
cagcgacaatcactgaacgct

SEQ ID NO: 130 - RNA, 21 nt, synthetic construct
  source 1..21: mol_type = other RNA; note = Description of Artificial Sequence: Synthetic oligonucleotide
caatcactgaacgccgaagct

SEQ ID NO: 131 - RNA, 21 nt, synthetic construct
  source 1..21: mol_type = other RNA; note = Description of Artificial Sequence: Synthetic oligonucleotide
actgaacgccgaagcctgcat

SEQ ID NO: 132 - RNA, 21 nt, synthetic construct
  source 1..21: mol_type = other RNA; note = Description of Artificial Sequence: Synthetic oligonucleotide
acgccgaagcctgcagccatt

SEQ ID NO: 133 - RNA, 21 nt, synthetic construct
  source 1..21: mol_type = other RNA; note = Description of Artificial Sequence: Synthetic oligonucleotide
gaagcctgcagccatgcgact

SEQ ID NO: 134 - RNA, 21 nt, synthetic construct
  source 1..21: mol_type = other RNA; note = Description of Artificial Sequence: Synthetic oligonucleotide
tgcagccatgcgaccccacgt

SEQ ID NO: 135 - RNA, 21 nt, synthetic construct
  source 1..21: mol_type = other RNA; note = Description of Artificial Sequence: Synthetic oligonucleotide
gcgaccccacgccaccccgtt

SEQ ID NO: 136 - RNA, 21 nt, synthetic construct
  source 1..21: mol_type = other RNA; note = Description of Artificial Sequence: Synthetic oligonucleotide
cccacgccaccccgtgcctct

SEQ ID NO: 137 - RNA, 21 nt, synthetic construct
  source 1..21: mol_type = other RNA; note = Description of Artificial Sequence: Synthetic oligonucleotide
ccaccccgtgcctcctgcctt

SEQ ID NO: 138 - RNA, 21 nt, synthetic construct
  source 1..21: mol_type = other RNA; note = Description of Artificial Sequence: Synthetic oligonucleotide
cgtgcctcctgcctccgcgct

SEQ ID NO: 139 - RNA, 21 nt, synthetic construct
  source 1..21: mol_type = other RNA; note = Description of Artificial Sequence: Synthetic oligonucleotide
ctcctgcctccgcgcagcctt

SEQ ID NO: 140 - RNA, 21 nt, synthetic construct
  source 1..21: mol_type = other RNA; note = Description of Artificial Sequence: Synthetic oligonucleotide
gcctccgcgcagcctgcagct

SEQ ID NO: 141 - RNA, 21 nt, synthetic construct
  source 1..21: mol_type = other RNA; note = Description of Artificial Sequence: Synthetic oligonucleotide
cctgtccccgccccagccgtt

SEQ ID NO: 142 - RNA, 21 nt, synthetic construct
  source 1..21: mol_type = other RNA; note = Description of Artificial Sequence: Synthetic oligonucleotide
cccgccccagccgtcctcctt

SEQ ID NO: 143 - RNA, 21 nt, synthetic construct
  source 1..21: mol_type = other RNA; note = Description of Artificial Sequence: Synthetic oligonucleotide
cccagccgtcctcctggggtt

SEQ ID NO: 144 - RNA, 21 nt, synthetic construct
  source 1..21: mol_type = other RNA; note = Description of Artificial Sequence: Synthetic oligonucleotide
tcctggggtggaccctagttt

SEQ ID NO: 145 - RNA, 21 nt, synthetic construct
  source 1..21: mol_type = other RNA; note = Description of Artificial Sequence: Synthetic oligonucleotide
gggtggaccctagtttaatat

SEQ ID NO: 146 - RNA, 21 nt, synthetic construct
  source 1..21: mol_type = other RNA; note = Description of Artificial Sequence: Synthetic oligonucleotide
gaccctagtttaataaagatt

SEQ ID NO: 147 - RNA, 21 nt, synthetic construct
  source 1..21: mol_type = other RNA; note = Description of Artificial Sequence: Synthetic oligonucleotide
tagtttaataaagattcacct

SEQ ID NO: 148 - RNA, 21 nt, synthetic construct
  source 1..21: mol_type = other RNA; note = Description of Artificial Sequence: Synthetic oligonucleotide
taataaagattcaccaagttt

SEQ ID NO: 149 - RNA, 21 nt, synthetic construct
  source 1..21: mol_type = other RNA; note = Description of Artificial Sequence: Synthetic oligonucleotide
agattcaccaagtttcacgct

SEQ ID NO: 150 - RNA, 23 nt, synthetic construct
  source 1..23: mol_type = other RNA; note = Description of Artificial Sequence: Synthetic oligonucleotide
acttcctgcctgtgattggccag

SEQ ID NO: 151 - RNA, 23 nt, synthetic construct
  source 1..23: mol_type = other RNA; note = Description of Artificial Sequence: Synthetic oligonucleotide
aaaccttcatcttcctgcctgtg

SEQ ID NO: 152 - RNA, 23 nt, synthetic construct
  source 1..23: mol_type = other RNA; note = Description of Artificial Sequence: Synthetic oligonucleotide
acacagaaccttcatcttcctgc

SEQ ID NO: 153 - RNA, 23 nt, synthetic construct
  source 1..23: mol_type = other RNA; note = Description of Artificial Sequence: Synthetic oligonucleotide
agcagcccacagaaccttcatct

SEQ ID NO: 154 - RNA, 23 nt, synthetic construct
  source 1..23: mol_type = other RNA; note = Description of Artificial Sequence: Synthetic oligonucleotide
acagcaacgcagcccacagaacc

SEQ ID NO: 155 - RNA, 23 nt, synthetic construct
  source 1..23: mol_type = other RNA; note = Description of Artificial Sequence: Synthetic oligonucleotide
agtgaccagcaacgcagcccaca

SEQ ID NO: 156 - RNA, 23 nt, synthetic construct
  source 1..23: mol_type = other RNA; note = Description of Artificial Sequence: Synthetic oligonucleotide
aaggaatgtgaccagcaacgcag

SEQ ID NO: 157 - RNA, 23 nt, synthetic construct
  source 1..23: mol_type = other RNA; note = Description of Artificial Sequence: Synthetic oligonucleotide
actgccaggaatgtgaccagcaa

SEQ ID NO: 158 - RNA, 23 nt, synthetic construct
  source 1..23: mol_type = other RNA; note = Description of Artificial Sequence: Synthetic oligonucleotide
agcatcctgccaggaatgtgacc

SEQ ID NO: 159 - RNA, 23 nt, synthetic construct
  source 1..23: mol_type = other RNA; note = Description of Artificial Sequence: Synthetic oligonucleotide
acttggcctggcatcctgccagg

SEQ ID NO: 160 - RNA, 23 nt, synthetic construct
  source 1..23: mol_type = other RNA; note = Description of Artificial Sequence: Synthetic oligonucleotide
agcttgctccaccttggcctggc

SEQ ID NO: 161 - RNA, 23 nt, synthetic construct
  source 1..23: mol_type = other RNA; note = Description of Artificial Sequence: Synthetic oligonucleotide
atccaccgcttgctccaccttgg

SEQ ID NO: 162 - RNA, 23 nt, synthetic construct
  source 1..23: mol_type = other RNA; note = Description of Artificial Sequence: Synthetic oligonucleotide
aggctctgtctccaccgcttgct

SEQ ID NO: 163 - RNA, 23 nt, synthetic construct
  source 1..23: mol_type = other RNA; note = Description of Artificial Sequence: Synthetic oligonucleotide
agctccggctctgtctccaccgc

SEQ ID NO: 164 - RNA, 23 nt, synthetic construct
  source 1..23: mol_type = other RNA; note = Description of Artificial Sequence: Synthetic oligonucleotide
agtctgctggcgcagctcgggct

SEQ ID NO: 165 - RNA, 23 nt, synthetic construct
  source 1..23: mol_type = other RNA; note = Description of Artificial Sequence: Synthetic oligonucleotide
aactcggtctgctggcgcagctc

SEQ ID NO: 166 - RNA, 23 nt, synthetic construct
  source 1..23: mol_type = other RNA; note = Description of Artificial Sequence: Synthetic oligonucleotide
atctgccactcggtctgctggcg

SEQ ID NO: 167 - RNA, 23 nt, synthetic construct
  source 1..23: mol_type = other RNA; note = Description of Artificial Sequence: Synthetic oligonucleotide
aagtgccagttcccagcgctggc

SEQ ID NO: 168 - RNA, 23 nt, synthetic construct
  source 1..23: mol_type = other RNA; note = Description of Artificial Sequence: Synthetic oligonucleotide
agacccagtgccagttcccagcg

SEQ ID NO: 169 - RNA, 23 nt, synthetic construct
  source 1..23: mol_type = other RNA; note = Description of Artificial Sequence: Synthetic oligonucleotide
aaaagcgacccagtgccagttcc

SEQ ID NO: 170 - RNA, 23 nt, synthetic construct
  source 1..23: mol_type = other RNA; note = Description of Artificial Sequence: Synthetic oligonucleotide
aatcccaaaagcgacccagtgcc

SEQ ID NO: 171 - RNA, 23 nt, synthetic construct
  source 1..23: mol_type = other RNA; note = Description of Artificial Sequence: Synthetic oligonucleotide
acaggtaatcccaaaagcgaccc

SEQ ID NO: 172 - RNA, 23 nt, synthetic construct
  source 1..23: mol_type = other RNA; note = Description of Artificial Sequence: Synthetic oligonucleotide
acagcgcaggtaatcccaaaagc

SEQ ID NO: 173 - RNA, 23 nt, synthetic construct
  source 1..23: mol_type = other RNA; note = Description of Artificial Sequence: Synthetic oligonucleotide
aagtgtctgcacccagcgcaggt

SEQ ID NO: 174 - RNA, 23 nt, synthetic construct
  source 1..23: mol_type = other RNA; note = Description of Artificial Sequence: Synthetic oligonucleotide
atcagacagtgtctgcacccagc

SEQ ID NO: 175 - RNA, 23 nt, synthetic construct
  source 1..23: mol_type = other RNA; note = Description of Artificial Sequence: Synthetic oligonucleotide
aacctgctcagacagtgtctgca

SEQ ID NO: 176 - RNA, 23 nt, synthetic construct
  source 1..23: mol_type = other RNA; note = Description of Artificial Sequence: Synthetic oligonucleotide
agagctgagcagctcctcctgca

SEQ ID NO: 177 - RNA, 23 nt, synthetic construct
  source 1..23: mol_type = other RNA; note = Description of Artificial Sequence: Synthetic oligonucleotide
agtgacctgggagctgagcagct

SEQ ID NO: 178 - RNA, 23 nt, synthetic construct
  source 1..23: mol_type = other RNA; note = Description of Artificial Sequence: Synthetic oligonucleotide
aagttcctgggtgacctgggagc

SEQ ID NO: 179 - RNA, 23 nt, synthetic construct
  source 1..23: mol_type = other RNA; note = Description of Artificial Sequence: Synthetic oligonucleotide
aagcgccctcagttcctgggtga

SEQ ID NO: 180 - RNA, 23 nt, synthetic construct
  source 1..23: mol_type = other RNA; note = Description of Artificial Sequence: Synthetic oligonucleotide
actcgtccatcagcgccctcagt

SEQ ID NO: 181 - RNA, 23 nt, synthetic construct
  source 1..23: mol_type = other RNA; note = Description of Artificial Sequence: Synthetic oligonucleotide
aatggtctcgtccatcagcgccc

SEQ ID NO: 182 - RNA, 23 nt, synthetic construct
  source 1..23: mol_type = other RNA; note = Description of Artificial Sequence: Synthetic oligonucleotide
aaactccttcatggtctcgtcca

SEQ ID NO: 183 - RNA, 23 nt, synthetic construct
  source 1..23: mol_type = other RNA; note = Description of Artificial Sequence: Synthetic oligonucleotide
agccttcaactccttcatggtct

SEQ ID NO: 184 - RNA, 23 nt, synthetic construct
  source 1..23: mol_type = other RNA; note = Description of Artificial Sequence: Synthetic oligonucleotide
aatttgtaggccttcaactcctt

SEQ ID NO: 185 - RNA, 23 nt, synthetic construct
  source 1..23: mol_type = other RNA; note = Description of Artificial Sequence: Synthetic oligonucleotide
aagttccgatttgtaggccttca

SEQ ID NO: 186 - RNA, 23 nt, synthetic construct
  source 1..23: mol_type = other RNA; note = Description of Artificial Sequence: Synthetic oligonucleotide
attcctccagttccgatttgtag

SEQ ID NO: 187 - RNA, 23 nt, synthetic construct
  source 1..23: mol_type = other RNA; note = Description of Artificial Sequence: Synthetic oligonucleotide
aagttgttcctccagttccgatt

SEQ ID NO: 188 - RNA, 23 nt, synthetic construct
  source 1..23: mol_type = other RNA; note = Description of Artificial Sequence: Synthetic oligonucleotide
aaccggggtcagttgttcctcca

SEQ ID NO: 189 - RNA, 23 nt, synthetic construct
  source 1..23: mol_type = other RNA; note = Description of Artificial Sequence: Synthetic oligonucleotide
acttggacagccgtgcccgcgtc

SEQ ID NO: 190 - RNA, 23 nt, synthetic construct
  source 1..23: mol_type = other RNA; note = Description of Artificial Sequence: Synthetic oligonucleotide
aagctccttggacagccgtgccc

SEQ ID NO: 191 - RNA, 23 nt, synthetic construct
  source 1..23: mol_type = other RNA; note = Description of Artificial Sequence: Synthetic oligonucleotide
acctgcagctccttggacagccg

SEQ ID NO: 192 - RNA, 23 nt, synthetic construct
  source 1..23: mol_type = other RNA; note = Description of Artificial Sequence: Synthetic oligonucleotide
aatgtccgcgcccagccgggcct

SEQ ID NO: 193 - RNA, 23 nt, synthetic construct
  source 1..23: mol_type = other RNA; note = Description of Artificial Sequence: Synthetic oligonucleotide
atcctccatgtccgcgcccagcc

SEQ ID NO: 194 - RNA, 23 nt, synthetic construct
  source 1..23: mol_type = other RNA; note = Description of Artificial Sequence: Synthetic oligonucleotide
agcacgtcctccatgtccgcgcc

SEQ ID NO: 195 - RNA, 23 nt, synthetic construct
  source 1..23: mol_type = other RNA; note = Description of Artificial Sequence: Synthetic oligonucleotide
acacacgtcctccatgtccgcgc

SEQ ID NO: 196 - RNA, 23 nt, synthetic construct
  source 1..23: mol_type = other RNA; note = Description of Artificial Sequence: Synthetic oligonucleotide
acgcacgtcctccatgtccgcgc

SEQ ID NO: 197 - RNA, 23 nt, synthetic construct
  source 1..23: mol_type = other RNA; note = Description of Artificial Sequence: Synthetic oligonucleotide
agcgcacgtcctccatgtccgcg

SEQ ID NO: 198 - RNA, 23 nt, synthetic construct
  source 1..23: mol_type = other RNA; note = Description of Artificial Sequence: Synthetic oligonucleotide
acgcgcacgtcctccatgtccgc

SEQ ID NO: 199 - RNA, 23 nt, synthetic construct
  source 1..23: mol_type = other RNA; note = Description of Artificial Sequence: Synthetic oligonucleotide
accgcgcacgtcctccatgtccg

SEQ ID NO: 200 - RNA, 23 nt, synthetic construct
  source 1..23: mol_type = other RNA; note = Description of Artificial Sequence: Synthetic oligonucleotide
agccgcgcacgtcctccatgtcc

SEQ ID NO: 201 - RNA, 23 nt, synthetic construct
  source 1..23: mol_type = other RNA; note = Description of Artificial Sequence: Synthetic oligonucleotide
aggccgcgcacgtcctccatgtc

SEQ ID NO: 202 - RNA, 23 nt, synthetic construct
  source 1..23: mol_type = other RNA; note = Description of Artificial Sequence: Synthetic oligonucleotide
acggccgcgcacgtcctccatgt

SEQ ID NO: 203 - RNA, 23 nt, synthetic construct
  source 1..23: mol_type = other RNA; note = Description of Artificial Sequence: Synthetic oligonucleotide
agcggccgcgcacgtcctccatg

SEQ ID NO: 204 - RNA, 23 nt, synthetic construct
  source 1..23: mol_type = other RNA; note = Description of Artificial Sequence: Synthetic oligonucleotide
aggcggccgcgcacgtcctccat

SEQ ID NO: 205 - RNA, 23 nt, synthetic construct
  source 1..23: mol_type = other RNA; note = Description of Artificial Sequence: Synthetic oligonucleotide
aaggcggccgcgcacgtcctcca

SEQ ID NO: 206 - RNA, 23 nt, synthetic construct
  source 1..23: mol_type = other RNA; note = Description of Artificial Sequence: Synthetic oligonucleotide
acaggcggccgcgcacgtcctcc

SEQ ID NO: 207 - RNA, 23 nt, synthetic construct
  source 1..23: mol_type = other RNA; note = Description of Artificial Sequence: Synthetic oligonucleotide
accaggcggccgcgcacgtcctc

SEQ ID NO: 208 - RNA, 23 nt, synthetic construct
  source 1..23: mol_type = other RNA; note = Description of Artificial Sequence: Synthetic oligonucleotide
aaccaggcggccgcgcacgtcct

SEQ ID NO: 209 - RNA, 23 nt, synthetic construct
  source 1..23: mol_type = other RNA; note = Description of Artificial Sequence: Synthetic oligonucleotide
acaccaggcggccgcgcacgtcc

SEQ ID NO: 210 - RNA, 23 nt, synthetic construct
  source 1..23: mol_type = other RNA; note = Description of Artificial Sequence: Synthetic oligonucleotide
agcaccaggcggccgcgcacgtc

SEQ ID NO: 211 - RNA, 23 nt, synthetic construct
  source 1..23: mol_type = other RNA; note = Description of Artificial Sequence: Synthetic oligonucleotide
atgcaccaggcggccgcgcacgt

SEQ ID NO: 212 - RNA, 23 nt, synthetic construct
  source 1..23: mol_type = other RNA; note = Description of Artificial Sequence: Synthetic oligonucleotide
agtactgcaccaggcggccgcac

SEQ ID NO: 213 - RNA, 23 nt, synthetic construct
  source 1..23: mol_type = other RNA; note = Description of Artificial Sequence: Synthetic oligonucleotide
accgcggtactgcaccaggcggc

SEQ ID NO: 214 - RNA, 23 nt, synthetic construct
  source 1..23: mol_type = other RNA; note = Description of Artificial Sequence: Synthetic oligonucleotide
accgagcatggcctgcacctcgc

SEQ ID NO: 215 - RNA, 23 nt, synthetic construct
  source 1..23: mol_type = other RNA; note = Description of Artificial Sequence: Synthetic oligonucleotide
agtgctctggccgagcatggcct

SEQ ID NO: 216 - RNA, 23 nt, synthetic construct
  source 1..23: mol_type = other RNA; note = Description of Artificial Sequence: Synthetic oligonucleotide
aagctcctcggtgctctggccga

SEQ ID NO: 217 - RNA, 23 nt, synthetic construct
  source 1..23: mol_type = other RNA; note = Description of Artificial Sequence: Synthetic oligonucleotide
aaggcgaggcgcacccgcagctc

SEQ ID NO: 218 - RNA, 23 nt, synthetic construct
  source 1..23: mol_type = other RNA; note = Description of Artificial Sequence: Synthetic oligonucleotide
aaggtgggaggcgaggcgcaccc

SEQ ID NO: 219 - RNA, 23 nt, synthetic construct
  source 1..23: mol_type = other RNA; note = Description of Artificial Sequence: Synthetic oligonucleotide
agcttgcgcaggtgggaggcgag

SEQ ID NO: 220 - RNA, 23 nt, synthetic construct
  source 1..23: mol_type = other RNA; note = Description of Artificial Sequence: Synthetic oligonucleotide
aacgcagcttgcgcaggtgggag

SEQ ID NO: 221 - RNA, 23 nt, synthetic construct
  source 1..23: mol_type = other RNA; note = Description of Artificial Sequence: Synthetic oligonucleotide
acgcttacgcagcttgcgcaggt

SEQ ID NO: 222 - RNA, 23 nt, synthetic construct
  source 1..23: mol_type = other RNA; note = Description of Artificial Sequence: Synthetic oligonucleotide
aaggagccgcttacgcagcttgc

SEQ ID NO: 223 - RNA, 23 nt, synthetic construct
  source 1..23: mol_type = other RNA; note = Description of Artificial Sequence: Synthetic oligonucleotide
aatcgcggaggagccgcttacgc

SEQ ID NO: 224 - RNA, 23 nt, synthetic construct
  source 1..23: mol_type = other RNA; note = Description of Artificial Sequence: Synthetic oligonucleotide
aatcggcatcgcggaggagccgc

SEQ ID NO: 225 - RNA, 23 nt, synthetic construct
  source 1..23: mol_type = other RNA; note = Description of Artificial Sequence: Synthetic oligonucleotide
aaggtcatcggcatcgcggagga

SEQ ID NO: 226 - RNA, 23 nt, synthetic construct
  source 1..23: mol_type = other RNA; note = Description of Artificial Sequence: Synthetic oligonucleotide
attctgcaggtcatcggcatcgc

SEQ ID NO: 227 - RNA, 23 nt, synthetic construct
  source 1..23: mol_type = other RNA; note = Description of Artificial Sequence: Synthetic oligonucleotide
aaggcgcttctgcaggtcatcgg

SEQ ID NO: 228 - RNA, 23 nt, synthetic construct
  source 1..23: mol_type = other RNA; note = Description of Artificial Sequence: Synthetic oligonucleotide
aactgccaggcgcttctgcaggt

SEQ ID NO: 229 - RNA, 23 nt, synthetic construct
  source 1..23: mol_type = other RNA; note = Description of Artificial Sequence: Synthetic oligonucleotide
atggtacactgccaggcgcttct

SEQ ID NO: 230 - RNA, 23 nt, synthetic construct
  source 1..23: mol_type = other RNA; note = Description of Artificial Sequence: Synthetic oligonucleotide
accggcctggtacactgccaggc

SEQ ID NO: 231 - RNA, 23 nt, synthetic construct
  source 1..23: mol_type = other RNA; note = Description of Artificial Sequence: Synthetic oligonucleotide
aatggcgctgaggccgcgctcgg

SEQ ID NO: 232 - RNA, 23 nt, synthetic construct
  source 1..23: mol_type = other RNA; note = Description of Artificial Sequence: Synthetic oligonucleotide
acgcggatggcgctgaggccgcg

SEQ ID NO: 233 - RNA, 23 nt, synthetic construct
  source 1..23: mol_type = other RNA; note = Description of Artificial Sequence: Synthetic oligonucleotide
aaggcgctcgcggatggcgctga

SEQ ID NO: 234 - RNA, 23 nt, synthetic construct
  source 1..23: mol_type = other RNA; note = Description of Artificial Sequence: Synthetic oligonucleotide
actgttccaccaggggccccagg

SEQ ID NO: 235 - RNA, 23 nt, synthetic construct
  source 1..23: mol_type = other RNA; note = Description of Artificial Sequence: Synthetic oligonucleotide
acggccctgttccaccaggggcc

SEQ ID NO: 236 - RNA, 23 nt, synthetic construct
  source 1..23: mol_type = other RNA; note = Description of Artificial Sequence: Synthetic oligonucleotide
aacagtggcggcccgcacgcggc

SEQ ID NO: 237 - RNA, 23 nt, synthetic construct
  source 1..23: mol_type = other RNA; note = Description of Artificial Sequence: Synthetic oligonucleotide
aagggagcccacagtggcggccc

SEQ ID NO: 238 - RNA, 23 nt, synthetic construct
  source 1..23: mol_type = other RNA; note = Description of Artificial Sequence: Synthetic oligonucleotide
agtagcggctggccggccaggga

SEQ ID NO: 239 - RNA, 23 nt, synthetic construct
  source 1..23: mol_type = other RNA; note = Description of Artificial Sequence: Synthetic oligonucleotide
acgctcctgtagcggctggccgg

SEQ ID NO: 240 - RNA, 23 nt, synthetic construct
  source 1..23: mol_type = other RNA; note = Description of Artificial Sequence: Synthetic oligonucleotide
agggcccgctcctgtagcggctg

SEQ ID NO: 241 - RNA, 23 nt, synthetic construct
  source 1..23: mol_type = other RNA; note = Description of Artificial Sequence: Synthetic oligonucleotide
acccatctcctccatccgcgcgc

SEQ ID NO: 242 - RNA, 23 nt, synthetic construct
  source 1..23: mol_type = other RNA; note = Description of Artificial Sequence: Synthetic oligonucleotide
aacctcgtccaggcggtcgcggg

SEQ ID NO: 243 - RNA, 23 nt, synthetic construct
  source 1..23: mol_type = other RNA; note = Description of Artificial Sequence: Synthetic oligonucleotide
actccttcacctcgtccaggcgg

SEQ ID NO: 244 - RNA, 23 nt, synthetic construct
  source 1..23: mol_type = other RNA; note = Description of Artificial Sequence: Synthetic oligonucleotide
aacctgctccttcacctcgtcca

SEQ ID NO: 245 - RNA, 23 nt, synthetic construct
  source 1..23: mol_type = other RNA; note = Description of Artificial Sequence: Synthetic oligonucleotide
accagcttggcgcgcacctccgc

SEQ ID NO: 246 - RNA, 23 nt, synthetic construct
  source 1..23: mol_type = other RNA; note = Description of Artificial Sequence: Synthetic oligonucleotide
atgctcctccagcttggcgcgca

SEQ ID NO: 247 - RNA, 23 nt, synthetic construct
  source 1..23: mol_type = other RNA; note = Description of Artificial Sequence: Synthetic oligonucleotide
aaggcgtatctgctgggcctgct

SEQ ID NO: 248 - RNA, 23 nt, synthetic construct
  source 1..23: mol_type = other RNA; note = Description of Artificial Sequence: Synthetic oligonucleotide
acctgcaggcgtatctgctgggc

SEQ ID NO: 249 - RNA, 23 nt, synthetic construct
  source 1..23: mol_type = other RNA; note = Description of Artificial Sequence: Synthetic oligonucleotide
aaaggcctcggcctgcaggcgta

SEQ ID NO: 250 - RNA, 23 nt, synthetic construct
  source 1..23: mol_type = other RNA; note = Description of Artificial Sequence: Synthetic oligonucleotide
acctggaaggcctcggcctgcag

SEQ ID NO: 251 - RNA, 23 nt, synthetic construct
  source 1..23: mol_type = other RNA; note = Description of Artificial Sequence: Synthetic oligonucleotide
agcgggcctggaaggcctcggcc

SEQ ID NO: 252 - RNA, 23 nt, synthetic construct
  source 1..23: mol_type = other RNA; note = Description of Artificial Sequence: Synthetic oligonucleotide
attgaggcgggcctggaaggcct

SEQ ID NO: 253 - RNA, 23 nt, synthetic construct
  source 1..23: mol_type = other RNA; note = Description of Artificial Sequence: Synthetic oligonucleotide
aagctcttgaggcgggcctggaa

SEQ ID NO: 254 - RNA, 23 nt, synthetic construct
  source 1..23: mol_type = other RNA; note = Description of Artificial Sequence: Synthetic oligonucleotide
acgaaccagctcttgaggcgggc

SEQ ID NO: 255 - RNA, 23 nt, synthetic construct
  source 1..23: mol_type = other RNA; note = Description of Artificial Sequence: Synthetic oligonucleotide
aggggctcgaaccagctcttgag

SEQ ID NO: 256 - RNA, 23 nt, synthetic construct
  source 1..23: mol_type = other RNA; note = Description of Artificial Sequence: Synthetic oligonucleotide
acatgtcttccaccaggggctcg

SEQ ID NO: 257 - RNA, 23 nt, synthetic construct
  source 1..23: mol_type = other RNA; note = Description of Artificial Sequence: Synthetic oligonucleotide
acgctgcatgtcttccaccaggg

SEQ ID NO: 258 - RNA, 23 nt, synthetic construct
  source 1..23: mol_type = other RNA; note = Description of Artificial Sequence: Synthetic oligonucleotide
aactggcgctgcatgtcttccac

SEQ ID NO: 259 - RNA, 23 nt, synthetic construct
  source 1..23: mol_type = other RNA; note = Description of Artificial Sequence: Synthetic oligonucleotide
aaccttctccaccagcccggccc

SEQ ID NO: 260 - RNA, 23 nt, synthetic construct
  source 1..23: mol_type = other RNA; note = Description of Artificial Sequence: Synthetic oligonucleotide
acctgcaccttctccaccagccc

SEQ ID NO: 261 - RNA, 23 nt, synthetic construct
  source 1..23: mol_type = other RNA; note = Description of Artificial Sequence: Synthetic oligonucleotide
aggcacaggggcggcgctggtgc

SEQ ID NO: 262 - RNA, 23 nt, synthetic construct
  source 1..23: mol_type = other RNA; note = Description of Artificial Sequence: Synthetic oligonucleotide
attgtcgctgggcacaggggcgg

SEQ ID NO: 263 - RNA, 23 nt, synthetic construct
  source 1..23: mol_type = other RNA; note = Description of Artificial Sequence: Synthetic oligonucleotide
aagtgattgtcgctgggcacagg

SEQ ID NO: 264 - RNA, 23 nt, synthetic construct
  source 1..23: mol_type = other RNA; note = Description of Artificial Sequence: Synthetic oligonucleotide
agcgttcagtgattgtcgctggg

SEQ ID NO: 265 - RNA, 23 nt, synthetic construct
  source 1..23: mol_type = other RNA; note = Description of Artificial Sequence: Synthetic oligonucleotide
agcttcggcgttcagtgattgtc

SEQ ID NO: 266 - RNA, 23 nt, synthetic construct
  source 1..23: mol_type = other RNA; note = Description of Artificial Sequence: Synthetic oligonucleotide
atgcaggcttcggcgttcagtga

SEQ ID NO: 267 - RNA, 23 nt, synthetic construct
  source 1..23: mol_type = other RNA; note = Description of Artificial Sequence: Synthetic oligonucleotide
aatggctgcaggcttcggcgttc

SEQ ID NO: 268 - RNA, 23 nt, synthetic construct
  source 1..23: mol_type = other RNA; note = Description of Artificial Sequence: Synthetic oligonucleotide
agtcgcatggctgcaggcttcgg

SEQ ID NO: 269 - RNA, 23 nt, synthetic construct
  source 1..23: mol_type = other RNA; note = Description of Artificial Sequence: Synthetic oligonucleotide
acgtggggtcgcatggctgcagg

SEQ ID NO: 270 - RNA, 23 nt, synthetic construct
  source 1..23: mol_type = other RNA; note = Description of Artificial Sequence: Synthetic oligonucleotide
aacggggtggcgtggggtcgcat

SEQ ID NO: 271 - RNA, 23 nt, synthetic construct
  source 1..23: mol_type = other RNA; note = Description of Artificial Sequence: Synthetic oligonucleotide
agaggcacggggtggcgtggggt

SEQ ID NO: 272 - RNA, 23 nt, synthetic construct
  source 1..23: mol_type = other RNA; note = Description of Artificial Sequence: Synthetic oligonucleotide
aaggcaggaggcacggggtggcg

SEQ ID NO: 273 - RNA, 23 nt, synthetic construct
  source 1..23: mol_type = other RNA; note = Description of Artificial Sequence: Synthetic oligonucleotide
agcgcggaggcaggaggcacggg

SEQ ID NO: 274 - RNA, 23 nt, synthetic construct
  source 1..23: mol_type = other RNA; note = Description of Artificial Sequence: Synthetic oligonucleotide
aaggctgcgcggaggcaggaggc

SEQ ID NO: 275 - RNA, 23 nt, synthetic construct
  source 1..23: mol_type = other RNA; note = Description of Artificial Sequence: Synthetic oligonucleotide
agctgcaggctgcgcggaggcag

SEQ ID NO: 276 - RNA, 23 nt, synthetic construct
  source 1..23: mol_type = other RNA; note = Description of Artificial Sequence: Synthetic oligonucleotide
aacggctggggcggggacagggt

SEQ ID NO: 277 - RNA, 23 nt, synthetic construct
  source 1..23: mol_type = other RNA; note = Description of Artificial Sequence: Synthetic oligonucleotide
aaggaggacggctggggcgggga

SEQ ID NO: 278 - RNA, 23 nt, synthetic construct
  source 1..23: mol_type = other RNA; note = Description of Artificial Sequence: Synthetic oligonucleotide
aaccccaggaggacggctggggc

SEQ ID NO: 279 - RNA, 23 nt, synthetic construct
  source 1..23: mol_type = other RNA; note = Description of Artificial Sequence: Synthetic oligonucleotide
aaactagggtccaccccaggagg

SEQ ID NO: 280 - RNA, 23 nt, synthetic construct
  source 1..23: mol_type = other RNA; note = Description of Artificial Sequence: Synthetic oligonucleotide
atattaaactagggtccacccca

SEQ ID NO: 281 - RNA, 23 nt, synthetic construct
  source 1..23: mol_type = other RNA; note = Description of Artificial Sequence: Synthetic oligonucleotide
aatctttattaaactagggtcca

SEQ ID NO: 282 - RNA, 23 nt, synthetic construct
  source 1..23: mol_type = other RNA; note = Description of Artificial Sequence: Synthetic oligonucleotide
aggtgaatctttattaaactagg

SEQ ID NO: 283 - RNA, 23 nt, synthetic construct
  source 1..23: mol_type = other RNA; note = Description of Artificial Sequence: Synthetic oligonucleotide
aaacttggtgaatctttattaaa

SEQ ID NO: 284 - RNA, 23 nt, synthetic construct
  source 1..23: mol_type = other RNA; note = Description of Artificial Sequence: Synthetic oligonucleotide
agcgtgaaacttggtgaatcttt

SEQ ID NO: 285 - RNA, 21 nt, synthetic construct
  source 1..21: mol_type = other RNA; note = Description of Artificial Sequence: Synthetic oligonucleotide
  modified_base 1: mod_base = OTHER; note = 2'-O-methylguanosine-3'- phosphorothioate
  modified_base 2: mod_base = OTHER; note = 2'-O-methylguanosine-3'- phosphorothioate
  modified_base 3: mod_base = OTHER; note = 2'-O-methylcytidine-3'-phosphate
  modified_base 4: mod_base = OTHER; note = 2'-O-methylcytidine-3'-phosphate
  modified_base 5: mod_base = OTHER; note = 2'-O-methyladenosine-3'-phosphate
  modified_base 6: mod_base = OTHER; note = 2'-O-methyladenosine-3'-phosphate
  modified_base 7: mod_base = OTHER; note = 2'-fluorouridine-3'-phosphate
  modified_base 8: mod_base = OTHER; note = 2'-O-methylcytidine-3'-phosphate
  modified_base 9: mod_base = OTHER; note = 2'-fluoroadenosine-3'-phosphate
  modified_base 10: mod_base = OTHER; note = 2'-fluorocytidine-3'-phosphate
  modified_base 11: mod_base = OTHER; note = 2'-fluoroadenosine-3'-phosphate
  modified_base 12: mod_base = OTHER; note = 2'-O-methylguanosine-3'-phosphate
  modified_base 13: mod_base = OTHER; note = 2'-O-methylguanosine-3'-phosphate
  modified_base 14: mod_base = OTHER; note = 2'-O-methylcytidine-3'-phosphate
  modified_base 15: mod_base = OTHER; note = 2'-O-methyladenosine-3'-phosphate
  modified_base 16: mod_base = OTHER; note = 2'-O-methylguanosine-3'-phosphate
  modified_base 17: mod_base = OTHER; note = 2'-O-methylguanosine-3'-phosphate
  modified_base 18: mod_base = OTHER; note = 2'-O-methyladenosine-3'-phosphate
  modified_base 19: mod_base = OTHER; note = 2'-O-methyladenosine-3'-phosphate
  modified_base 20: mod_base = OTHER; note = 2'-O-methylguanosine-3'-phosphate
  modified_base 21: mod_base = OTHER; note = 2'-O-methyluridine-3'-phosphate N-[tris(N-acetylgalactosamine-alkyl)-amidodecanoyl)]-4-hydr oxyprolinol Hyp-(GalNAc-alkyl)3
ggccaatcacaggcaggaagt

SEQ ID NO: 286 - RNA, 21 nt, synthetic construct
  source 1..21: mol_type = other RNA; note = Description of Artificial Sequence: Synthetic oligonucleotide
  modified_base 1: mod_base = OTHER; note = 2'-O-methylcytidine-3'- phosphorothioate
  modified_base 2: mod_base = OTHER; note = 2'-O-methyladenosine-3'- phosphorothioate
  modified_base 3: mod_base = OTHER; note = 2'-O-methylguanosine-3'-phosphate
  modified_base 4: mod_base = OTHER; note = 2'-O-methylguanosine-3'-phosphate
  modified_base 5: mod_base = OTHER; note = 2'-O-methylcytidine-3'-phosphate
  modified_base 6: mod_base = OTHER; note = 2'-O-methyladenosine-3'-phosphate
  modified_base 7: mod_base = OTHER; note = 2'-fluoroguanosine-3'-phosphate
  modified_base 8: mod_base = OTHER; note = 2'-O-methylguanosine-3'-phosphate
  modified_base 9: mod_base = OTHER; note = 2'-fluoroadenosine-3'-phosphate
  modified_base 10: mod_base = OTHER; note = 2'-fluoroadenosine-3'-phosphate
  modified_base 11: mod_base = OTHER; note = 2'-fluoroguanosine-3'-phosphate
  modified_base 12: mod_base = OTHER; note = 2'-O-methyladenosine-3'-phosphate
  modified_base 13: mod_base = OTHER; note = 2'-O-methyluridine-3'-phosphate
  modified_base 14: mod_base = OTHER; note = 2'-O-methylguanosine-3'-phosphate
  modified_base 15: mod_base = OTHER; note = 2'-O-methyladenosine-3'-phosphate
  modified_base 16: mod_base = OTHER; note = 2'-O-methyladenosine-3'-phosphate
  modified_base 17: mod_base = OTHER; note = 2'-O-methylguanosine-3'-phosphate
  modified_base 18: mod_base = OTHER; note = 2'-O-methylguanosine-3'-phosphate
  modified_base 19: mod_base = OTHER; note = 2'-O-methyluridine-3'-phosphate
  modified_base 20: mod_base = OTHER; note = 2'-O-methyluridine-3'-phosphate
  modified_base 21: mod_base = OTHER; note = 2'-O-methyluridine-3'-phosphate N-[tris(N-acetylgalactosamine-alkyl)-amidodecanoyl)]-4-hydr oxyprolinol Hyp-(GalNAc-alkyl)3
caggcaggaagatgaaggttt

SEQ ID NO: 287 - RNA, 21 nt, synthetic construct
  source 1..21: mol_type = other RNA; note = Description of Artificial Sequence: Synthetic oligonucleotide
  modified_base 1: mod_base = OTHER; note = 2'-O-methyladenosine-3'- phosphorothioate
  modified_base 2: mod_base = OTHER; note = 2'-O-methylguanosine-3'- phosphorothioate
  modified_base 3: mod_base = OTHER; note = 2'-O-methylguanosine-3'-phosphate
  modified_base 4: mod_base = OTHER; note = 2'-O-methyladenosine-3'-phosphate
  modified_base 5: mod_base = OTHER; note = 2'-O-methyladenosine-3'-phosphate
  modified_base 6: mod_base = OTHER; note = 2'-O-methylguanosine-3'-phosphate
  modified_base 7: mod_base = OTHER; note = 2'-fluoroadenosine-3'-phosphate
  modified_base 8: mod_base = OTHER; note = 2'-O-methyluridine-3'-phosphate
  modified_base 9: mod_base = OTHER; note = 2'-fluoroguanosine-3'-phosphate
  modified_base 10: mod_base = OTHER; note = 2'-fluoroadenosine-3'-phosphate
  modified_base 11: mod_base = OTHER; note = 2'-fluoroadenosine-3'-phosphate
  modified_base 12: mod_base = OTHER; note = 2'-O-methylguanosine-3'-phosphate
  modified_base 13: mod_base = OTHER; note = 2'-O-methylguanosine-3'-phosphate
  modified_base 14: mod_base = OTHER; note = 2'-O-methyluridine-3'-phosphate
  modified_base 15: mod_base = OTHER; note = 2'-O-methyluridine-3'-phosphate
  modified_base 16: mod_base = OTHER; note = 2'-O-methylcytidine-3'-phosphate
  modified_base 17: mod_base = OTHER; note = 2'-O-methyluridine-3'-phosphate
  modified_base 18: mod_base = OTHER; note = 2'-O-methylguanosine-3'-phosphate
  modified_base 19: mod_base = OTHER; note = 2'-O-methyluridine-3'-phosphate
  modified_base 20: mod_base = OTHER; note = 2'-O-methylguanosine-3'-phosphate
  modified_base 21: mod_base = OTHER; note = 2'-O-methyluridine-3'-phosphate N-[tris(N-acetylgalactosamine-alkyl)-amidodecanoyl)]-4-hydr oxyprolinol Hyp-(GalNAc-alkyl)3
aggaagatgaaggttctgtgt

SEQ ID NO: 288 - RNA, 21 nt, synthetic construct
  source 1..21: mol_type = other RNA; note = Description of Artificial Sequence: Synthetic oligonucleotide
  modified_base 1: mod_base = OTHER; note = 2'-O-methyladenosine-3'- phosphorothioate
  modified_base 2: mod_base = OTHER; note = 2'-O-methyluridine-3'-phosphorothioate
  modified_base 3: mod_base = OTHER; note = 2'-O-methylguanosine-3'-phosphate
  modified_base 4: mod_base = OTHER; note = 2'-O-methyladenosine-3'-phosphate
  modified_base 5: mod_base = OTHER; note = 2'-O-methyladenosine-3'-phosphate
  modified_base 6: mod_base = OTHER; note = 2'-O-methylguanosine-3'-phosphate
  modified_base 7: mod_base = OTHER; note = 2'-fluoroguanosine-3'-phosphate
  modified_base 8: mod_base = OTHER; note = 2'-O-methyluridine-3'-phosphate
  modified_base 9: mod_base = OTHER; note = 2'-fluorouridine-3'-phosphate
  modified_base 10: mod_base = OTHER; note = 2'-fluorocytidine-3'-phosphate
  modified_base 11: mod_base = OTHER; note = 2'-fluorouridine-3'-phosphate
  modified_base 12: mod_base = OTHER; note = 2'-O-methylguanosine-3'-phosphate
  modified_base 13: mod_base = OTHER; note = 2'-O-methyluridine-3'-phosphate
  modified_base 14: mod_base = OTHER; note = 2'-O-methylguanosine-3'-phosphate
  modified_base 15: mod_base = OTHER; note = 2'-O-methylguanosine-3'-phosphate
  modified_base 16: mod_base = OTHER; note = 2'-O-methylguanosine-3'-phosphate
  modified_base 17: mod_base = OTHER; note = 2'-O-methylcytidine-3'-phosphate
  modified_base 18: mod_base = OTHER; note = 2'-O-methyluridine-3'-phosphate
  modified_base 19: mod_base = OTHER; note = 2'-O-methylguanosine-3'-phosphate
  modified_base 20: mod_base = OTHER; note = 2'-O-methylcytidine-3'-phosphate
  modified_base 21: mod_base = OTHER; note = 2'-O-methyluridine-3'-phosphate N-[tris(N-acetylgalactosamine-alkyl)-amidodecanoyl)]-4-hydr oxyprolinol Hyp-(GalNAc-alkyl)3
atgaaggttctgtgggctgct

SEQ ID NO: 289 - RNA, 21 nt, synthetic construct
  source 1..21: mol_type = other RNA; note = Description of Artificial Sequence: Synthetic oligonucleotide
  modified_base 1: mod_base = OTHER; note = 2'-O-methyluridine-3'-phosphorothioate
  modified_base 2: mod_base = OTHER; note = 2'-O-methyluridine-3'-phosphorothioate
  modified_base 3: mod_base = OTHER; note = 2'-O-methylcytidine-3'-phosphate
  modified_base 4: mod_base = OTHER; note = 2'-O-methyluridine-3'-phosphate
  modified_base 5: mod_base = OTHER; note = 2'-O-methylguanosine-3'-phosphate
  modified_base 6: mod_base = OTHER; note = 2'-O-methyluridine-3'-phosphate
  modified_base 7: mod_base = OTHER; note = 2'-fluoroguanosine-3'-phosphate
  modified_base 8: mod_base = OTHER; note = 2'-O-methylguanosine-3'-phosphate
  modified_base 9: mod_base = OTHER; note = 2'-fluoroguanosine-3'-phosphate
  modified_base 10: mod_base = OTHER; note = 2'-fluorocytidine-3'-phosphate
  modified_base 11: mod_base = OTHER; note = 2'-fluorouridine-3'-phosphate
  modified_base 12: mod_base = OTHER; note = 2'-O-methylguanosine-3'-phosphate
  modified_base 13: mod_base = OTHER; note = 2'-O-methylcytidine-3'-phosphate
  modified_base 14: mod_base = OTHER; note = 2'-O-methylguanosine-3'-phosphate
  modified_base 15: mod_base = OTHER; note = 2'-O-methyluridine-3'-phosphate
  modified_base 16: mod_base = OTHER; note = 2'-O-methyluridine-3'-phosphate
  modified_base 17: mod_base = OTHER; note = 2'-O-methylguanosine-3'-phosphate
  modified_base 18: mod_base = OTHER; note = 2'-O-methylcytidine-3'-phosphate
  modified_base 19: mod_base = OTHER; note = 2'-O-methyluridine-3'-phosphate
  modified_base 20: mod_base = OTHER; note = 2'-O-methylguanosine-3'-phosphate
  modified_base 21: mod_base = OTHER; note = 2'-O-methyluridine-3'-phosphate N-[tris(N-acetylgalactosamine-alkyl)-amidodecanoyl)]-4-hydr oxyprolinol Hyp-(GalNAc-alkyl)3
ttctgtgggctgcgttgctgt

SEQ ID NO: 290 - RNA, 21 nt, synthetic construct
  source 1..21: mol_type = other RNA; note = Description of Artificial Sequence: Synthetic oligonucleotide
  modified_base 1: mod_base = OTHER; note = 2'-O-methyluridine-3'-phosphorothioate
  modified_base 2: mod_base = OTHER; note = 2'-O-methylguanosine-3'- phosphorothioate
  modified_base 3: mod_base = OTHER; note = 2'-O-methylguanosine-3'-phosphate
  modified_base 4: mod_base = OTHER; note = 2'-O-methylguanosine-3'-phosphate
  modified_base 5: mod_base = OTHER; note = 2'-O-methylcytidine-3'-phosphate
  modified_base 6: mod_base = OTHER; note = 2'-O-methyluridine-3'-phosphate
  modified_base 7: mod_base = OTHER; note = 2'-fluoroguanosine-3'-phosphate
  modified_base 8: mod_base = OTHER; note = 2'-O-methylcytidine-3'-phosphate
  modified_base 9: mod_base = OTHER; note = 2'-fluoroguanosine-3'-phosphate
  modified_base 10: mod_base = OTHER; note = 2'-fluorouridine-3'-phosphate
  modified_base 11: mod_base = OTHER; note = 2'-fluorouridine-3'-phosphate
  modified_base 12: mod_base = OTHER; note = 2'-O-methylguanosine-3'-phosphate
  modified_base 13: mod_base = OTHER; note = 2'-O-methylcytidine-3'-phosphate
  modified_base 14: mod_base = OTHER; note = 2'-O-methyluridine-3'-phosphate
  modified_base 15: mod_base = OTHER; note = 2'-O-methylguanosine-3'-phosphate
  modified_base 16: mod_base = OTHER; note = 2'-O-methylguanosine-3'-phosphate
  modified_base 17: mod_base = OTHER; note = 2'-O-methyluridine-3'-phosphate
  modified_base 18: mod_base = OTHER; note = 2'-O-methylcytidine-3'-phosphate
  modified_base 19: mod_base = OTHER; note = 2'-O-methyladenosine-3'-phosphate
  modified_base 20: mod_base = OTHER; note = 2'-O-methylcytidine-3'-phosphate
  modified_base 21: mod_base = OTHER; note = 2'-O-methyluridine-3'-phosphate N-[tris(N-acetylgalactosamine-alkyl)-amidodecanoyl)]-4-hydr oxyprolinol Hyp-(GalNAc-alkyl)3
tgggctgcgttgctggtcact

SEQ ID NO: 291 - RNA, 21 nt, synthetic construct
  source 1..21: mol_type = other RNA; note = Description of Artificial Sequence: Synthetic oligonucleotide
  modified_base 1: mod_base = OTHER; note = 2'-O-methylguanosine-3'- phosphorothioate
  modified_base 2: mod_base = OTHER; note = 2'-O-methylcytidine-3'- phosphorothioate
  modified_base 3: mod_base = OTHER; note = 2'-O-methylguanosine-3'-phosphate
  modified_base 4: mod_base = OTHER; note = 2'-O-methyluridine-3'-phosphate
  modified_base 5: mod_base = OTHER; note = 2'-O-methyluridine-3'-phosphate
  modified_base 6: mod_base = OTHER; note = 2'-O-methylguanosine-3'-phosphate
  modified_base 7: mod_base = OTHER; note = 2'-fluorocytidine-3'-phosphate
  modified_base 8: mod_base = OTHER; note = 2'-O-methyluridine-3'-phosphate
  modified_base 9: mod_base = OTHER; note = 2'-fluoroguanosine-3'-phosphate
  modified_base 10: mod_base = OTHER; note = 2'-fluoroguanosine-3'-phosphate
  modified_base 11: mod_base = OTHER; note = 2'-fluorouridine-3'-phosphate
  modified_base 12: mod_base = OTHER; note = 2'-O-methylcytidine-3'-phosphate
  modified_base 13: mod_base = OTHER; note = 2'-O-methyladenosine-3'-phosphate
  modified_base 14: mod_base = OTHER; note = 2'-O-methylcytidine-3'-phosphate
  modified_base 15: mod_base = OTHER; note = 2'-O-methyladenosine-3'-phosphate
  modified_base 16: mod_base = OTHER; note = 2'-O-methyluridine-3'-phosphate
  modified_base 17: mod_base = OTHER; note = 2'-O-methyluridine-3'-phosphate
  modified_base 18: mod_base = OTHER; note = 2'-O-methylcytidine-3'-phosphate
  modified_base 19: mod_base = OTHER; note = 2'-O-methylcytidine-3'-phosphate
  modified_base 20: mod_base = OTHER; note = 2'-O-methyluridine-3'-phosphate
  modified_base 21: mod_base = OTHER; note = 2'-O-methyluridine-3'-phosphate N-[tris(N-acetylgalactosamine-alkyl)-amidodecanoyl)]-4-hydr oxyprolinol Hyp-(GalNAc-alkyl)3
gcgttgctggtcacattcctt

SEQ ID NO: 292 - RNA, 21 nt, synthetic construct
  source 1..21: mol_type = other RNA; note = Description of Artificial Sequence: Synthetic oligonucleotide
  modified_base 1: mod_base = OTHER; note = 2'-O-methylguanosine-3'- phosphorothioate
  modified_base 2: mod_base = OTHER; note = 2'-O-methylcytidine-3'- phosphorothioate
  modified_base 3: mod_base = OTHER; note = 2'-O-methyluridine-3'-phosphate
  modified_base 4: mod_base = OTHER; note = 2'-O-methylguanosine-3'-phosphate
  modified_base 5: mod_base = OTHER; note = 2'-O-methylguanosine-3'-phosphate
  modified_base 6: mod_base = OTHER; note = 2'-O-methyluridine-3'-phosphate
  modified_base 7: mod_base = OTHER; note = 2'-fluorocytidine-3'-phosphate
  modified_base 8: mod_base = OTHER; note = 2'-O-methyladenosine-3'-phosphate
  modified_base 9: mod_base = OTHER; note = 2'-fluorocytidine-3'-phosphate
  modified_base 10: mod_base = OTHER; note = 2'-fluoroadenosine-3'-phosphate
  modified_base 11: mod_base = OTHER; note = 2'-fluorouridine-3'-phosphate
  modified_base 12: mod_base = OTHER; note = 2'-O-methyluridine-3'-phosphate
  modified_base 13: mod_base = OTHER; note = 2'-O-methylcytidine-3'-phosphate
  modified_base 14: mod_base = OTHER; note = 2'-O-methylcytidine-3'-phosphate
  modified_base 15: mod_base = OTHER; note = 2'-O-methyluridine-3'-phosphate
  modified_base 16: mod_base = OTHER; note = 2'-O-methylguanosine-3'-phosphate
  modified_base 17: mod_base = OTHER; note = 2'-O-methylguanosine-3'-phosphate
  modified_base 18: mod_base = OTHER; note = 2'-O-methylcytidine-3'-phosphate
  modified_base 19: mod_base = OTHER; note = 2'-O-methyladenosine-3'-phosphate
  modified_base 20: mod_base = OTHER; note = 2'-O-methylguanosine-3'-phosphate
  modified_base 21: mod_base = OTHER; note = 2'-O-methyluridine-3'-phosphate N-[tris(N-acetylgalactosamine-alkyl)-amidodecanoyl)]-4-hydr oxyprolinol Hyp-(GalNAc-alkyl)3
gctggtcacattcctggcagt

SEQ ID NO: 293 - RNA, 21 nt, synthetic construct
  source 1..21: mol_type = other RNA; note = Description of Artificial Sequence: Synthetic oligonucleotide
  modified_base 1: mod_base = OTHER; note = 2'-O-methyluridine-3'-phosphorothioate
  modified_base 2: mod_base = OTHER; note = 2'-O-methylcytidine-3'- phosphorothioate
  modified_base 3: mod_base = OTHER; note = 2'-O-methyladenosine-3'-phosphate
  modified_base 4: mod_base = OTHER; note = 2'-O-methylcytidine-3'-phosphate
  modified_base 5: mod_base = OTHER; note = 2'-O-methyladenosine-3'-phosphate
  modified_base 6: mod_base = OTHER; note = 2'-O-methyluridine-3'-phosphate
  modified_base 7: mod_base = OTHER; note = 2'-fluorouridine-3'-phosphate
  modified_base 8: mod_base = OTHER; note = 2'-O-methylcytidine-3'-phosphate
  modified_base 9: mod_base = OTHER; note = 2'-fluorocytidine-3'-phosphate
  modified_base 10: mod_base = OTHER; note = 2'-fluorouridine-3'-phosphate
  modified_base 11: mod_base = OTHER; note = 2'-fluoroguanosine-3'-phosphate
  modified_base 12: mod_base = OTHER; note = 2'-O-methylguanosine-3'-phosphate
  modified_base 13: mod_base = OTHER; note = 2'-O-methylcytidine-3'-phosphate
  modified_base 14: mod_base = OTHER; note = 2'-O-methyladenosine-3'-phosphate
  modified_base 15: mod_base = OTHER; note = 2'-O-methylguanosine-3'-phosphate
  modified_base 16: mod_base = OTHER; note = 2'-O-methylguanosine-3'-phosphate
  modified_base 17: mod_base = OTHER; note = 2'-O-methyladenosine-3'-phosphate
  modified_base 18: mod_base = OTHER; note = 2'-O-methyluridine-3'-phosphate
  modified_base 19: mod_base = OTHER; note = 2'-O-methylguanosine-3'-phosphate
  modified_base 20: mod_base = OTHER; note = 2'-O-methylcytidine-3'-phosphate
  modified_base 21: mod_base = OTHER; note = 2'-O-methyluridine-3'-phosphate N-[tris(N-acetylgalactosamine-alkyl)-amidodecanoyl)]-4-hydr oxyprolinol Hyp-(GalNAc-alkyl)3
tcacattcctggcaggatgct

SEQ ID NO: 294 - RNA, 21 nt, synthetic construct
  source 1..21: mol_type = other RNA; note = Description of Artificial Sequence: Synthetic oligonucleotide
  modified_base 1: mod_base = OTHER; note = 2'-O-methyluridine-3'-phosphorothioate
  modified_base 2: mod_base = OTHER; note = 2'-O-methylguanosine-3'- phosphorothioate
  modified_base 3: mod_base = OTHER; note = 2'-O-methylguanosine-3'-phosphate
  modified_base 4: mod_base = OTHER; note = 2'-O-methylcytidine-3'-phosphate
  modified_base 5: mod_base = OTHER; note = 2'-O-methyladenosine-3'-phosphate
  modified_base 6: mod_base = OTHER; note = 2'-O-methylguanosine-3'-phosphate
  modified_base 7: mod_base = OTHER; note = 2'-fluoroguanosine-3'-phosphate
  modified_base 8: mod_base = OTHER; note = 2'-O-methyladenosine-3'-phosphate
  modified_base 9: mod_base = OTHER; note = 2'-fluorouridine-3'-phosphate
  modified_base 10: mod_base = OTHER; note = 2'-fluoroguanosine-3'-phosphate
  modified_base 11: mod_base = OTHER; note = 2'-fluorocytidine-3'-phosphate
  modified_base 12: mod_base = OTHER; note = 2'-O-methylcytidine-3'-phosphate
  modified_base 13: mod_base = OTHER; note = 2'-O-methyladenosine-3'-phosphate
  modified_base 14: mod_base = OTHER; note = 2'-O-methylguanosine-3'-phosphate
  modified_base 15: mod_base = OTHER; note = 2'-O-methylguanosine-3'-phosphate
  modified_base 16: mod_base = OTHER; note = 2'-O-methylcytidine-3'-phosphate
  modified_base 17: mod_base = OTHER; note = 2'-O-methylcytidine-3'-phosphate
  modified_base 18: mod_base = OTHER; note = 2'-O-methyladenosine-3'-phosphate
  modified_base 19: mod_base = OTHER; note = 2'-O-methyladenosine-3'-phosphate
  modified_base 20: mod_base = OTHER; note = 2'-O-methylguanosine-3'-phosphate
  modified_base 21: mod_base = OTHER; note = 2'-O-methyluridine-3'-phosphate N-[tris(N-acetylgalactosamine-alkyl)-amidodecanoyl)]-4-hydr oxyprolinol Hyp-(GalNAc-alkyl)3
tggcaggatgccaggccaagt

SEQ ID NO: 295 - RNA, 21 nt, synthetic construct
  source 1..21: mol_type = other RNA; note = Description of Artificial Sequence: Synthetic oligonucleotide
  modified_base 1: mod_base = OTHER; note = 2'-O-methylcytidine-3'- phosphorothioate
  modified_base 2: mod_base = OTHER; note = 2'-O-methyladenosine-3'- phosphorothioate
  modified_base 3: mod_base = OTHER; note = 2'-O-methylguanosine-3'-phosphate
  modified_base 4: mod_base = OTHER; note = 2'-O-methylguanosine-3'-phosphate
  modified_base 5: mod_base = OTHER; note = 2'-O-methylcytidine-3'-phosphate
  modified_base 6: mod_base = OTHER; note = 2'-O-methylcytidine-3'-phosphate
  modified_base 7: mod_base = OTHER; note = 2'-fluoroadenosine-3'-phosphate
  modified_base 8: mod_base = OTHER; note = 2'-O-methyladenosine-3'-phosphate
  modified_base 9: mod_base = OTHER; note = 2'-fluoroguanosine-3'-phosphate
  modified_base 10: mod_base = OTHER; note = 2'-fluoroguanosine-3'-phosphate
  modified_base 11: mod_base = OTHER; note = 2'-fluorouridine-3'-phosphate
  modified_base 12: mod_base = OTHER; note = 2'-O-methylguanosine-3'-phosphate
  modified_base 13: mod_base = OTHER; note = 2'-O-methylguanosine-3'-phosphate
  modified_base 14: mod_base = OTHER; note = 2'-O-methyladenosine-3'-phosphate
  modified_base 15: mod_base = OTHER; note = 2'-O-methylguanosine-3'-phosphate
  modified_base 16: mod_base = OTHER; note = 2'-O-methylcytidine-3'-phosphate
  modified_base 17: mod_base = OTHER; note = 2'-O-methyladenosine-3'-phosphate
  modified_base 18: mod_base = OTHER; note = 2'-O-methyladenosine-3'-phosphate
  modified_base 19: mod_base = OTHER; note = 2'-O-methylguanosine-3'-phosphate
  modified_base 20: mod_base = OTHER; note = 2'-O-methylcytidine-3'-phosphate
  modified_base 21: mod_base = OTHER; note = 2'-O-methyluridine-3'-phosphate N-[tris(N-acetylgalactosamine-alkyl)-amidodecanoyl)]-4-hydr oxyprolinol Hyp-(GalNAc-alkyl)3
caggccaaggtggagcaagct

SEQ ID NO: 296 - RNA, 21 nt, synthetic construct
  source 1..21: mol_type = other RNA; note = Description of Artificial Sequence: Synthetic oligonucleotide
  modified_base 1: mod_base = OTHER; note = 2'-O-methyladenosine-3'- phosphorothioate
  modified_base 2: mod_base = OTHER; note = 2'-O-methyladenosine-3'- phosphorothioate
  modified_base 3: mod_base = OTHER; note = 2'-O-methylguanosine-3'-phosphate
  modified_base 4: mod_base = OTHER; note = 2'-O-methylguanosine-3'-phosphate
  modified_base 5: mod_base = OTHER; note = 2'-O-methyluridine-3'-phosphate
  modified_base 6: mod_base = OTHER; note = 2'-O-methylguanosine-3'-phosphate
  modified_base 7: mod_base = OTHER; note = 2'-fluoroguanosine-3'-phosphate
  modified_base 8: mod_base = OTHER; note = 2'-O-methyladenosine-3'-phosphate
  modified_base 9: mod_base = OTHER; note = 2'-fluoroguanosine-3'-phosphate
  modified_base 10: mod_base = OTHER; note = 2'-fluorocytidine-3'-phosphate
  modified_base 11: mod_base = OTHER; note = 2'-fluoroadenosine-3'-phosphate
  modified_base 12: mod_base = OTHER; note = 2'-O-methyladenosine-3'-phosphate
  modified_base 13: mod_base = OTHER; note = 2'-O-methylguanosine-3'-phosphate
  modified_base 14: mod_base = OTHER; note = 2'-O-methylcytidine-3'-phosphate
  modified_base 15: mod_base = OTHER; note = 2'-O-methylguanosine-3'-phosphate
  modified_base 16: mod_base = OTHER; note = 2'-O-methylguanosine-3'-phosphate
  modified_base 17: mod_base = OTHER; note = 2'-O-methyluridine-3'-phosphate
  modified_base 18: mod_base = OTHER; note = 2'-O-methylguanosine-3'-phosphate
  modified_base 19: mod_base = OTHER; note = 2'-O-methylguanosine-3'-phosphate
  modified_base 20: mod_base = OTHER; note = 2'-O-methyladenosine-3'-phosphate
  modified_base 21: mod_base = OTHER; note = 2'-O-methyluridine-3'-phosphate N-[tris(N-acetylgalactosamine-alkyl)-amidodecanoyl)]-4-hydr oxyprolinol Hyp-(GalNAc-alkyl)3
aaggtggagcaagcggtggat

SEQ ID NO: 297 - RNA, 21 nt, synthetic construct
  source 1..21: mol_type = other RNA; note = Description of Artificial Sequence: Synthetic oligonucleotide
  modified_base 1: mod_base = OTHER; note = 2'-O-methylcytidine-3'- phosphorothioate
  modified_base 2: mod_base = OTHER; note = 2'-O-methyladenosine-3'- phosphorothioate
  modified_base 3: mod_base = OTHER; note = 2'-O-methyladenosine-3'-phosphate
  modified_base 4: mod_base = OTHER; note = 2'-O-methylguanosine-3'-phosphate
  modified_base 5: mod_base = OTHER; note = 2'-O-methylcytidine-3'-phosphate
  modified_base 6: mod_base = OTHER; note = 2'-O-methylguanosine-3'-phosphate
  modified_base 7: mod_base = OTHER; note = 2'-fluoroguanosine-3'-phosphate
  modified_base 8: mod_base = OTHER; note = 2'-O-methyluridine-3'-phosphate
  modified_base 9: mod_base = OTHER; note = 2'-fluoroguanosine-3'-phosphate
  modified_base 10: mod_base = OTHER; note = 2'-fluoroguanosine-3'-phosphate
  modified_base 11: mod_base = OTHER; note = 2'-fluoroadenosine-3'-phosphate
  modified_base 12: mod_base = OTHER; note = 2'-O-methylguanosine-3'-phosphate
  modified_base 13: mod_base = OTHER; note = 2'-O-methyladenosine-3'-phosphate
  modified_base 14: mod_base = OTHER; note = 2'-O-methylcytidine-3'-phosphate
  modified_base 15: mod_base = OTHER; note = 2'-O-methyladenosine-3'-phosphate
  modified_base 16: mod_base = OTHER; note = 2'-O-methylguanosine-3'-phosphate
  modified_base 17: mod_base = OTHER; note = 2'-O-methyladenosine-3'-phosphate
  modified_base 18: mod_base = OTHER; note = 2'-O-methylguanosine-3'-phosphate
  modified_base 19: mod_base = OTHER; note = 2'-O-methylcytidine-3'-phosphate
  modified_base 20: mod_base = OTHER; note = 2'-O-methylcytidine-3'-phosphate
  modified_base 21: mod_base = OTHER; note = 2'-O-methyluridine-3'-phosphate N-[tris(N-acetylgalactosamine-alkyl)-amidodecanoyl)]-4-hydr oxyprolinol Hyp-(GalNAc-alkyl)3
caagcggtggagacagagcct

SEQ ID NO: 298 - RNA, 21 nt, synthetic construct
  source 1..21: mol_type = other RNA; note = Description of Artificial Sequence: Synthetic oligonucleotide
  modified_base 1: mod_base = OTHER; note = 2'-O-methylguanosine-3'- phosphorothioate
  modified_base 2: mod_base = OTHER; note = 2'-O-methylguanosine-3'- phosphorothioate
  modified_base 3: mod_base = OTHER; note = 2'-O-methyluridine-3'-phosphate
  modified_base 4: mod_base = OTHER; note = 2'-O-methylguanosine-3'-phosphate
  modified_base 5: mod_base = OTHER; note = 2'-O-methylguanosine-3'-phosphate
  modified_base 6: mod_base = OTHER; note = 2'-O-methyladenosine-3'-phosphate
  modified_base 7: mod_base = OTHER; note = 2'-fluoroguanosine-3'-phosphate
  modified_base 8: mod_base = OTHER; note = 2'-O-methyladenosine-3'-phosphate
  modified_base 9: mod_base = OTHER; note = 2'-fluorocytidine-3'-phosphate
  modified_base 10: mod_base = OTHER; note = 2'-fluoroadenosine-3'-phosphate
  modified_base 11: mod_base = OTHER; note = 2'-fluoroguanosine-3'-phosphate
  modified_base 12: mod_base = OTHER; note = 2'-O-methyladenosine-3'-phosphate
  modified_base 13: mod_base = OTHER; note = 2'-O-methylguanosine-3'-phosphate
  modified_base 14: mod_base = OTHER; note = 2'-O-methylcytidine-3'-phosphate
  modified_base 15: mod_base = OTHER; note = 2'-O-methylcytidine-3'-phosphate
  modified_base 16: mod_base = OTHER; note = 2'-O-methylguanosine-3'-phosphate
  modified_base 17: mod_base = OTHER; note = 2'-O-methylguanosine-3'-phosphate
  modified_base 18: mod_base = OTHER; note = 2'-O-methyladenosine-3'-phosphate
  modified_base 19: mod_base = OTHER; note = 2'-O-methylguanosine-3'-phosphate
  modified_base 20: mod_base = OTHER; note = 2'-O-methylcytidine-3'-phosphate
  modified_base 21: mod_base = OTHER; note = 2'-O-methyluridine-3'-phosphate N-[tris(N-acetylgalactosamine-alkyl)-amidodecanoyl)]-4-hydr oxyprolinol Hyp-(GalNAc-alkyl)3
ggtggagacagagccggagct

SEQ ID NO: 299 - RNA, 21 nt, synthetic construct
  source 1..21: mol_type = other RNA; note = Description of Artificial Sequence: Synthetic oligonucleotide
  modified_base 1: mod_base = OTHER; note = 2'-O-methylcytidine-3'- phosphorothioate
  modified_base 2: mod_base = OTHER; note = 2'-O-methylcytidine-3'- phosphorothioate
  modified_base 3: mod_base = OTHER; note = 2'-O-methylcytidine-3'-phosphate
  modified_base 4: mod_base = OTHER; note = 2'-O-methylguanosine-3'-phosphate
  modified_base 5: mod_base = OTHER; note = 2'-O-methyladenosine-3'-phosphate
  modified_base 6: mod_base = OTHER; note = 2'-O-methylguanosine-3'-phosphate
  modified_base 7: mod_base = OTHER; note = 2'-fluorocytidine-3'-phosphate
  modified_base 8: mod_base = OTHER; note = 2'-O-methyluridine-3'-phosphate
  modified_base 9: mod_base = OTHER; note = 2'-fluoroguanosine-3'-phosphate
  modified_base 10: mod_base = OTHER; note = 2'-fluorocytidine-3'-phosphate
  modified_base 11: mod_base = OTHER; note = 2'-fluoroguanosine-3'-phosphate
  modified_base 12: mod_base = OTHER; note = 2'-O-methylcytidine-3'-phosphate
  modified_base 13: mod_base = OTHER; note = 2'-O-methylcytidine-3'-phosphate
  modified_base 14: mod_base = OTHER; note = 2'-O-methyladenosine-3'-phosphate
  modified_base 15: mod_base = OTHER; note = 2'-O-methylguanosine-3'-phosphate
  modified_base 16: mod_base = OTHER; note = 2'-O-methylcytidine-3'-phosphate
  modified_base 17: mod_base = OTHER; note = 2'-O-methyladenosine-3'-phosphate
  modified_base 18: mod_base = OTHER; note = 2'-O-methylguanosine-3'-phosphate
  modified_base 19: mod_base = OTHER; note = 2'-O-methyladenosine-3'-phosphate
  modified_base 20: mod_base = OTHER; note = 2'-O-methylcytidine-3'-phosphate
  modified_base 21: mod_base = OTHER; note = 2'-O-methyluridine-3'-phosphate N-[tris(N-acetylgalactosamine-alkyl)-amidodecanoyl)]-4-hydr oxyprolinol Hyp-(GalNAc-alkyl)3
cccgagctgcgccagcagact

SEQ ID NO: 300 - RNA, 21 nt, synthetic construct
  source 1..21: mol_type = other RNA; note = Description of Artificial Sequence: Synthetic oligonucleotide
  modified_base 1: mod_base = OTHER; note = 2'-O-methylguanosine-3'- phosphorothioate
  modified_base 2: mod_base = OTHER; note = 2'-O-methylcytidine-3'- phosphorothioate
  modified_base 3: mod_base = OTHER; note = 2'-O-methyluridine-3'-phosphate
  modified_base 4: mod_base = OTHER; note = 2'-O-methylguanosine-3'-phosphate
  modified_base 5: mod_base = OTHER; note = 2'-O-methylcytidine-3'-phosphate
  modified_base 6: mod_base = OTHER; note = 2'-O-methylguanosine-3'-phosphate
  modified_base 7: mod_base = OTHER; note = 2'-fluorocytidine-3'-phosphate
  modified_base 8: mod_base = OTHER; note = 2'-O-methylcytidine-3'-phosphate
  modified_base 9: mod_base = OTHER; note = 2'-fluoroadenosine-3'-phosphate
  modified_base 10: mod_base = OTHER; note = 2'-fluoroguanosine-3'-phosphate
  modified_base 11: mod_base = OTHER; note = 2'-fluorocytidine-3'-phosphate
  modified_base 12: mod_base = OTHER; note = 2'-O-methyladenosine-3'-phosphate
  modified_base 13: mod_base = OTHER; note = 2'-O-methylguanosine-3'-phosphate
  modified_base 14: mod_base = OTHER; note = 2'-O-methyladenosine-3'-phosphate
  modified_base 15: mod_base = OTHER; note = 2'-O-methylcytidine-3'-phosphate
  modified_base 16: mod_base = OTHER; note = 2'-O-methylcytidine-3'-phosphate
  modified_base 17: mod_base = OTHER; note = 2'-O-methylguanosine-3'-phosphate
  modified_base 18: mod_base = OTHER; note = 2'-O-methyladenosine-3'-phosphate
  modified_base 19: mod_base = OTHER; note = 2'-O-methylguanosine-3'-phosphate
  modified_base 20: mod_base = OTHER; note = 2'-O-methyluridine-3'-phosphate
  modified_base 21: mod_base = OTHER; note = 2'-O-methyluridine-3'-phosphate N-[tris(N-acetylgalactosamine-alkyl)-amidodecanoyl)]-4-hydr oxyprolinol Hyp-(GalNAc-alkyl)3
gctgcgccagcagaccgagtt

SEQ ID NO: 301 - RNA, 21 nt, synthetic construct
  source 1..21: mol_type = other RNA; note = Description of Artificial Sequence: Synthetic oligonucleotide
  modified_base 1: mod_base = OTHER; note = 2'-O-methylcytidine-3'- phosphorothioate
  modified_base 2: mod_base = OTHER; note = 2'-O-methylcytidine-3'- phosphorothioate
  modified_base 3: mod_base = OTHER; note = 2'-O-methyladenosine-3'-phosphate
  modified_base 4: mod_base = OTHER; note = 2'-O-methylguanosine-3'-phosphate
  modified_base 5: mod_base = OTHER; note = 2'-O-methylcytidine-3'-phosphate
  modified_base 6: mod_base = OTHER; note = 2'-O-methyladenosine-3'-phosphate
  modified_base 7: mod_base = OTHER; note = 2'-fluoroguanosine-3'-phosphate
  modified_base 8: mod_base = OTHER; note = 2'-O-methyladenosine-3'-phosphate
  modified_base 9: mod_base = OTHER; note = 2'-fluorocytidine-3'-phosphate
  modified_base 10: mod_base = OTHER; note = 2'-fluorocytidine-3'-phosphate
  modified_base 11: mod_base = OTHER; note = 2'-fluoroguanosine-3'-phosphate
  modified_base 12: mod_base = OTHER; note = 2'-O-methyladenosine-3'-phosphate
  modified_base 13: mod_base = OTHER; note = 2'-O-methylguanosine-3'-phosphate
  modified_base 14: mod_base = OTHER; note = 2'-O-methyluridine-3'-phosphate
  modified_base 15: mod_base = OTHER; note = 2'-O-methylguanosine-3'-phosphate
  modified_base 16: mod_base = OTHER; note = 2'-O-methylguanosine-3'-phosphate
  modified_base 17: mod_base = OTHER; note = 2'-O-methylcytidine-3'-phosphate
  modified_base 18: mod_base = OTHER; note = 2'-O-methyladenosine-3'-phosphate
  modified_base 19: mod_base = OTHER; note = 2'-O-methylguanosine-3'-phosphate
  modified_base 20: mod_base = OTHER; note = 2'-O-methyladenosine-3'-phosphate
  modified_base 21: mod_base = OTHER; note = 2'-O-methyluridine-3'-phosphate N-[tris(N-acetylgalactosamine-alkyl)-amidodecanoyl)]-4-hydr oxyprolinol Hyp-(GalNAc-alkyl)3
ccagcagaccgagtggcagat

SEQ ID NO: 302 - RNA, 21 nt, synthetic construct
  source 1..21: mol_type = other RNA; note = Description of Artificial Sequence: Synthetic oligonucleotide
  modified_base 1: mod_base = OTHER; note = 2'-O-methylcytidine-3'- phosphorothioate
  modified_base 2: mod_base = OTHER; note = 2'-O-methyladenosine-3'- phosphorothioate
  modified_base 3: mod_base = OTHER; note = 2'-O-methylguanosine-3'-phosphate
  modified_base 4: mod_base = OTHER; note = 2'-O-methylcytidine-3'-phosphate
  modified_base 5: mod_base = OTHER; note = 2'-O-methylguanosine-3'-phosphate
  modified_base 6: mod_base = OTHER; note = 2'-O-methylcytidine-3'-phosphate
  modified_base 7: mod_base = OTHER; note = 2'-fluorouridine-3'-phosphate
  modified_base 8: mod_base = OTHER; note = 2'-O-methylguanosine-3'-phosphate
  modified_base 9: mod_base = OTHER; note = 2'-fluoroguanosine-3'-phosphate
  modified_base 10: mod_base = OTHER; note = 2'-fluoroguanosine-3'-phosphate
  modified_base 11: mod_base = OTHER; note = 2'-fluoroadenosine-3'-phosphate
  modified_base 12: mod_base = OTHER; note = 2'-O-methyladenosine-3'-phosphate
  modified_base 13: mod_base = OTHER; note = 2'-O-methylcytidine-3'-phosphate
  modified_base 14: mod_base = OTHER; note = 2'-O-methyluridine-3'-phosphate
  modified_base 15: mod_base = OTHER; note = 2'-O-methylguanosine-3'-phosphate
  modified_base 16: mod_base = OTHER; note = 2'-O-methylguanosine-3'-phosphate
  modified_base 17: mod_base = OTHER; note = 2'-O-methylcytidine-3'-phosphate
  modified_base 18: mod_base = OTHER; note = 2'-O-methyladenosine-3'-phosphate
  modified_base 19: mod_base = OTHER; note = 2'-O-methylcytidine-3'-phosphate
  modified_base 20: mod_base = OTHER; note = 2'-O-methyluridine-3'-phosphate
  modified_base 21: mod_base = OTHER; note = 2'-O-methyluridine-3'-phosphate N-[tris(N-acetylgalactosamine-alkyl)-amidodecanoyl)]-4-hydr oxyprolinol Hyp-(GalNAc-alkyl)3
cagcgctgggaactggcactt

SEQ ID NO: 303 - RNA, 21 nt, synthetic construct
  source 1..21: mol_type = other RNA; note = Description of Artificial Sequence: Synthetic oligonucleotide
  modified_base 1: mod_base = OTHER; note = 2'-O-methylcytidine-3'- phosphorothioate
  modified_base 2: mod_base = OTHER; note = 2'-O-methyluridine-3'-phosphorothioate
  modified_base 3: mod_base = OTHER; note = 2'-O-methylguanosine-3'-phosphate
  modified_base 4: mod_base = OTHER; note = 2'-O-methylguanosine-3'-phosphate
  modified_base 5: mod_base = OTHER; note = 2'-O-methylguanosine-3'-phosphate
  modified_base 6: mod_base = OTHER; note = 2'-O-methyladenosine-3'-phosphate
  modified_base 7: mod_base = OTHER; note = 2'-fluoroadenosine-3'-phosphate
  modified_base 8: mod_base = OTHER; note = 2'-O-methylcytidine-3'-phosphate
  modified_base 9: mod_base = OTHER; note = 2'-fluorouridine-3'-phosphate
  modified_base 10: mod_base = OTHER; note = 2'-fluoroguanosine-3'-phosphate
  modified_base 11: mod_base = OTHER; note = 2'-fluoroguanosine-3'-phosphate
  modified_base 12: mod_base = OTHER; note = 2'-O-methylcytidine-3'-phosphate
  modified_base 13: mod_base = OTHER; note = 2'-O-methyladenosine-3'-phosphate
  modified_base 14: mod_base = OTHER; note = 2'-O-methylcytidine-3'-phosphate
  modified_base 15: mod_base = OTHER; note = 2'-O-methyluridine-3'-phosphate
  modified_base 16: mod_base = OTHER; note = 2'-O-methylguanosine-3'-phosphate
  modified_base 17: mod_base = OTHER; note = 2'-O-methylguanosine-3'-phosphate
  modified_base 18: mod_base = OTHER; note = 2'-O-methylguanosine-3'-phosphate
  modified_base 19: mod_base = OTHER; note = 2'-O-methyluridine-3'-phosphate
  modified_base 20: mod_base = OTHER; note = 2'-O-methylcytidine-3'-phosphate
  modified_base 21: mod_base = OTHER; note = 2'-O-methyluridine-3'-phosphate N-[tris(N-acetylgalactosamine-alkyl)-amidodecanoyl)]-4-hydr oxyprolinol Hyp-(GalNAc-alkyl)3
ctgggaactggcactgggtct

SEQ ID NO: 304 - RNA, 21 nt, synthetic construct
  source 1..21: mol_type = other RNA; note = Description of Artificial Sequence: Synthetic oligonucleotide
  modified_base 1: mod_base = OTHER; note = 2'-O-methyladenosine-3'- phosphorothioate
  modified_base 2: mod_base = OTHER; note = 2'-O-methyladenosine-3'- phosphorothioate
  modified_base 3: mod_base = OTHER; note = 2'-O-methylcytidine-3'-phosphate
  modified_base 4: mod_base = OTHER; note = 2'-O-methyluridine-3'-phosphate
  modified_base 5: mod_base = OTHER; note = 2'-O-methylguanosine-3'-phosphate
  modified_base 6: mod_base = OTHER; note = 2'-O-methylguanosine-3'-phosphate
  modified_base 7: mod_base = OTHER; note = 2'-fluorocytidine-3'-phosphate
  modified_base 8: mod_base = OTHER; note = 2'-O-methyladenosine-3'-phosphate
  modified_base 9: mod_base = OTHER; note = 2'-fluorocytidine-3'-phosphate
  modified_base 10: mod_base = OTHER; note = 2'-fluorouridine-3'-phosphate
  modified_base 11: mod_base = OTHER; note = 2'-fluoroguanosine-3'-phosphate
  modified_base 12: mod_base = OTHER; note = 2'-O-methylguanosine-3'-phosphate
  modified_base 13: mod_base = OTHER; note = 2'-O-methylguanosine-3'-phosphate
  modified_base 14: mod_base = OTHER; note = 2'-O-methyluridine-3'-phosphate
  modified_base 15: mod_base = OTHER; note = 2'-O-methylcytidine-3'-phosphate
  modified_base 16: mod_base = OTHER; note = 2'-O-methylguanosine-3'-phosphate
  modified_base 17: mod_base = OTHER; note = 2'-O-methylcytidine-3'-phosphate
  modified_base 18: mod_base = OTHER; note = 2'-O-methyluridine-3'-phosphate
  modified_base 19: mod_base = OTHER; note = 2'-O-methyluridine-3'-phosphate
  modified_base 20: mod_base = OTHER; note = 2'-O-methyluridine-3'-phosphate
  modified_base 21: mod_base = OTHER; note = 2'-O-methyluridine-3'-phosphate N-[tris(N-acetylgalactosamine-alkyl)-amidodecanoyl)]-4-hydr oxyprolinol Hyp-(GalNAc-alkyl)3
aactggcactgggtcgctttt

SEQ ID NO: 305 - RNA, 21 nt, synthetic construct
  source 1..21: mol_type = other RNA; note = Description of Artificial Sequence: Synthetic oligonucleotide
  modified_base 1: mod_base = OTHER; note = 2'-O-methylcytidine-3'- phosphorothioate
  modified_base 2: mod_base = OTHER; note = 2'-O-methyladenosine-3'- phosphorothioate
  modified_base 3: mod_base = OTHER; note = 2'-O-methylcytidine-3'-phosphate
  modified_base 4: mod_base = OTHER; note = 2'-O-methyluridine-3'-phosphate
  modified_base 5: mod_base = OTHER; note = 2'-O-methylguanosine-3'-phosphate
  modified_base 6: mod_base = OTHER; note = 2'-O-methylguanosine-3'-phosphate
  modified_base 7: mod_base = OTHER; note = 2'-fluoroguanosine-3'-phosphate
  modified_base 8: mod_base = OTHER; note = 2'-O-methyluridine-3'-phosphate
  modified_base 9: mod_base = OTHER; note = 2'-fluorocytidine-3'-phosphate
  modified_base 10: mod_base = OTHER; note = 2'-fluoroguanosine-3'-phosphate
  modified_base 11: mod_base = OTHER; note = 2'-fluorocytidine-3'-phosphate
  modified_base 12: mod_base = OTHER; note = 2'-O-methyluridine-3'-phosphate
  modified_base 13: mod_base = OTHER; note = 2'-O-methyluridine-3'-phosphate
  modified_base 14: mod_base = OTHER; note = 2'-O-methyluridine-3'-phosphate
  modified_base 15: mod_base = OTHER; note = 2'-O-methyluridine-3'-phosphate
  modified_base 16: mod_base = OTHER; note = 2'-O-methylguanosine-3'-phosphate
  modified_base 17: mod_base = OTHER; note = 2'-O-methylguanosine-3'-phosphate
  modified_base 18: mod_base = OTHER; note = 2'-O-methylguanosine-3'-phosphate
  modified_base 19: mod_base = OTHER; note = 2'-O-methyladenosine-3'-phosphate
  modified_base 20: mod_base = OTHER; note = 2'-O-methyluridine-3'-phosphate
  modified_base 21: mod_base = OTHER; note = 2'-O-methyluridine-3'-phosphate N-[tris(N-acetylgalactosamine-alkyl)-amidodecanoyl)]-4-hydr oxyprolinol Hyp-(GalNAc-alkyl)3
cactgggtcgcttttgggatt

SEQ ID NO: 306 - RNA, 21 nt, synthetic construct
  source 1..21: mol_type = other RNA; note = Description of Artificial Sequence: Synthetic oligonucleotide
  modified_base 1: mod_base = OTHER; note = 2'-O-methylguanosine-3'- phosphorothioate
  modified_base 2: mod_base = OTHER; note = 2'-O-methyluridine-3'-phosphorothioate
  modified_base 3: mod_base = OTHER; note = 2'-O-methylcytidine-3'-phosphate
  modified_base 4: mod_base = OTHER; note = 2'-O-methylguanosine-3'-phosphate
  modified_base 5: mod_base = OTHER; note = 2'-O-methylcytidine-3'-phosphate
  modified_base 6: mod_base = OTHER; note = 2'-O-methyluridine-3'-phosphate
  modified_base 7: mod_base = OTHER; note = 2'-fluorouridine-3'-phosphate
  modified_base 8: mod_base = OTHER; note = 2'-O-methyluridine-3'-phosphate
  modified_base 9: mod_base = OTHER; note = 2'-fluorouridine-3'-phosphate
  modified_base 10: mod_base = OTHER; note = 2'-fluoroguanosine-3'-phosphate
  modified_base 11: mod_base = OTHER; note = 2'-fluoroguanosine-3'-phosphate
  modified_base 12: mod_base = OTHER; note = 2'-O-methylguanosine-3'-phosphate
  modified_base 13: mod_base = OTHER; note = 2'-O-methyladenosine-3'-phosphate
  modified_base 14: mod_base = OTHER; note = 2'-O-methyluridine-3'-phosphate
  modified_base 15: mod_base = OTHER; note = 2'-O-methyluridine-3'-phosphate
  modified_base 16: mod_base = OTHER; note = 2'-O-methyladenosine-3'-phosphate
  modified_base 17: mod_base = OTHER; note = 2'-O-methylcytidine-3'-phosphate
  modified_base 18: mod_base = OTHER; note = 2'-O-methylcytidine-3'-phosphate
  modified_base 19: mod_base = OTHER; note = 2'-O-methyluridine-3'-phosphate
  modified_base 20: mod_base = OTHER; note = 2'-O-methylguanosine-3'-phosphate
  modified_base 21: mod_base = OTHER; note = 2'-O-methyluridine-3'-phosphate N-[tris(N-acetylgalactosamine-alkyl)-amidodecanoyl)]-4-hydr oxyprolinol Hyp-(GalNAc-alkyl)3
gtcgcttttgggattacctgt

SEQ ID NO: 307 - RNA, 21 nt, synthetic construct
  source 1..21: mol_type = other RNA; note = Description of Artificial Sequence: Synthetic oligonucleotide
  modified_base 1: mod_base = OTHER; note = 2'-O-methyluridine-3'-phosphorothioate
  modified_base 2: mod_base = OTHER; note = 2'-O-methyluridine-3'-phosphorothioate
  modified_base 3: mod_base = OTHER; note = 2'-O-methyluridine-3'-phosphate
  modified_base 4: mod_base = OTHER; note = 2'-O-methyluridine-3'-phosphate
  modified_base 5: mod_base = OTHER; note = 2'-O-methylguanosine-3'-phosphate
  modified_base 6: mod_base = OTHER; note = 2'-O-methylguanosine-3'-phosphate
  modified_base 7: mod_base = OTHER; note = 2'-fluoroguanosine-3'-phosphate
  modified_base 8: mod_base = OTHER; note = 2'-O-methyladenosine-3'-phosphate
  modified_base 9: mod_base = OTHER; note = 2'-fluorouridine-3'-phosphate
  modified_base 10: mod_base = OTHER; note = 2'-fluorouridine-3'-phosphate
  modified_base 11: mod_base = OTHER; note = 2'-fluoroadenosine-3'-phosphate
  modified_base 12: mod_base = OTHER; note = 2'-O-methylcytidine-3'-phosphate
  modified_base 13: mod_base = OTHER; note = 2'-O-methylcytidine-3'-phosphate
  modified_base 14: mod_base = OTHER; note = 2'-O-methyluridine-3'-phosphate
  modified_base 15: mod_base = OTHER; note = 2'-O-methylguanosine-3'-phosphate
  modified_base 16: mod_base = OTHER; note = 2'-O-methylcytidine-3'-phosphate
  modified_base 17: mod_base = OTHER; note = 2'-O-methylguanosine-3'-phosphate
  modified_base 18: mod_base = OTHER; note = 2'-O-methylcytidine-3'-phosphate
  modified_base 19: mod_base = OTHER; note = 2'-O-methyluridine-3'-phosphate
  modified_base 20: mod_base = OTHER; note = 2'-O-methylguanosine-3'-phosphate
  modified_base 21: mod_base = OTHER; note = 2'-O-methyluridine-3'-phosphate N-[tris(N-acetylgalactosamine-alkyl)-amidodecanoyl)]-4-hydr oxyprolinol Hyp-(GalNAc-alkyl)3
ttttgggattacctgcgctgt

SEQ ID NO: 308 - RNA, 21 nt, synthetic construct
  source 1..21: mol_type = other RNA; note = Description of Artificial Sequence: Synthetic oligonucleotide
  modified_base 1: mod_base = OTHER; note = 2'-O-methylcytidine-3'- phosphorothioate
  modified_base 2: mod_base = OTHER; note = 2'-O-methyluridine-3'-phosphorothioate
  modified_base 3: mod_base = OTHER; note = 2'-O-methylguanosine-3'-phosphate
  modified_base 4: mod_base = OTHER; note = 2'-O-methylcytidine-3'-phosphate
  modified_base 5: mod_base = OTHER; note = 2'-O-methylguanosine-3'-phosphate
  modified_base 6: mod_base = OTHER; note = 2'-O-methylcytidine-3'-phosphate
  modified_base 7: mod_base = OTHER; note = 2'-fluorouridine-3'-phosphate
  modified_base 8: mod_base = OTHER; note = 2'-O-methylguanosine-3'-phosphate
  modified_base 9: mod_base = OTHER; note = 2'-fluoroguanosine-3'-phosphate
  modified_base 10: mod_base = OTHER; note = 2'-fluoroguanosine-3'-phosphate
  modified_base 11: mod_base = OTHER; note = 2'-fluorouridine-3'-phosphate
  modified_base 12: mod_base = OTHER; note = 2'-O-methylguanosine-3'-phosphate
  modified_base 13: mod_base = OTHER; note = 2'-O-methylcytidine-3'-phosphate
  modified_base 14: mod_base = OTHER; note = 2'-O-methyladenosine-3'-phosphate
  modified_base 15: mod_base = OTHER; note = 2'-O-methylguanosine-3'-phosphate
  modified_base 16: mod_base = OTHER; note = 2'-O-methyladenosine-3'-phosphate
  modified_base 17: mod_base = OTHER; note = 2'-O-methylcytidine-3'-phosphate
  modified_base 18: mod_base = OTHER; note = 2'-O-methyladenosine-3'-phosphate
  modified_base 19: mod_base = OTHER; note = 2'-O-methylcytidine-3'-phosphate
  modified_base 20: mod_base = OTHER; note = 2'-O-methyluridine-3'-phosphate
  modified_base 21: mod_base = OTHER; note = 2'-O-methyluridine-3'-phosphate N-[tris(N-acetylgalactosamine-alkyl)-amidodecanoyl)]-4-hydr oxyprolinol Hyp-(GalNAc-alkyl)3
ctgcgctgggtgcagacactt

SEQ ID NO: 309 - RNA, 21 nt, synthetic construct
  source 1..21: mol_type = other RNA; note = Description of Artificial Sequence: Synthetic oligonucleotide
  modified_base 1: mod_base = OTHER; note = 2'-O-methyluridine-3'-phosphorothioate
  modified_base 2: mod_base = OTHER; note = 2'-O-methylguanosine-3'- phosphorothioate
  modified_base 3: mod_base = OTHER; note = 2'-O-methylguanosine-3'-phosphate
  modified_base 4: mod_base = OTHER; note = 2'-O-methylguanosine-3'-phosphate
  modified_base 5: mod_base = OTHER; note = 2'-O-methyluridine-3'-phosphate
  modified_base 6: mod_base = OTHER; note = 2'-O-methylguanosine-3'-phosphate
  modified_base 7: mod_base = OTHER; note = 2'-fluorocytidine-3'-phosphate
  modified_base 8: mod_base = OTHER; note = 2'-O-methyladenosine-3'-phosphate
  modified_base 9: mod_base = OTHER; note = 2'-fluoroguanosine-3'-phosphate
  modified_base 10: mod_base = OTHER; note = 2'-fluoroadenosine-3'-phosphate
  modified_base 11: mod_base = OTHER; note = 2'-fluorocytidine-3'-phosphate
  modified_base 12: mod_base = OTHER; note = 2'-O-methyladenosine-3'-phosphate
  modified_base 13: mod_base = OTHER; note = 2'-O-methylcytidine-3'-phosphate
  modified_base 14: mod_base = OTHER; note = 2'-O-methyluridine-3'-phosphate
  modified_base 15: mod_base = OTHER; note = 2'-O-methylguanosine-3'-phosphate
  modified_base 16: mod_base = OTHER; note = 2'-O-methyluridine-3'-phosphate
  modified_base 17: mod_base = OTHER; note = 2'-O-methylcytidine-3'-phosphate
  modified_base 18: mod_base = OTHER; note = 2'-O-methyluridine-3'-phosphate
  modified_base 19: mod_base = OTHER; note = 2'-O-methylguanosine-3'-phosphate
  modified_base 20: mod_base = OTHER; note = 2'-O-methyladenosine-3'-phosphate
  modified_base 21: mod_base = OTHER; note = 2'-O-methyluridine-3'-phosphate N-[tris(N-acetylgalactosamine-alkyl)-amidodecanoyl)]-4-hydr oxyprolinol Hyp-(GalNAc-alkyl)3
tgggtgcagacactgtctgat

SEQ ID NO: 310 - RNA, 21 nt, synthetic construct
  source 1..21: mol_type = other RNA; note = Description of Artificial Sequence: Synthetic oligonucleotide
  modified_base 1: mod_base = OTHER; note = 2'-O-methylcytidine-3'- phosphorothioate
  modified_base 2: mod_base = OTHER; note = 2'-O-methyladenosine-3'- phosphorothioate
  modified_base 3: mod_base = OTHER; note = 2'-O-methylguanosine-3'-phosphate
  modified_base 4: mod_base = OTHER; note = 2'-O-methyladenosine-3'-phosphate
  modified_base 5: mod_base = OTHER; note = 2'-O-methylcytidine-3'-phosphate
  modified_base 6: mod_base = OTHER; note = 2'-O-methyladenosine-3'-phosphate
  modified_base 7: mod_base = OTHER; note = 2'-fluorocytidine-3'-phosphate
  modified_base 8: mod_base = OTHER; note = 2'-O-methyluridine-3'-phosphate
  modified_base 9: mod_base = OTHER; note = 2'-fluoroguanosine-3'-phosphate
  modified_base 10: mod_base = OTHER; note = 2'-fluorouridine-3'-phosphate
  modified_base 11: mod_base = OTHER; note = 2'-fluorocytidine-3'-phosphate
  modified_base 12: mod_base = OTHER; note = 2'-O-methyluridine-3'-phosphate
  modified_base 13: mod_base = OTHER; note = 2'-O-methylguanosine-3'-phosphate
  modified_base 14: mod_base = OTHER; note = 2'-O-methyladenosine-3'-phosphate
  modified_base 15: mod_base = OTHER; note = 2'-O-methylguanosine-3'-phosphate
  modified_base 16: mod_base = OTHER; note = 2'-O-methylcytidine-3'-phosphate
  modified_base 17: mod_base = OTHER; note = 2'-O-methyladenosine-3'-phosphate
  modified_base 18: mod_base = OTHER; note = 2'-O-methylguanosine-3'-phosphate
  modified_base 19: mod_base = OTHER; note = 2'-O-methylguanosine-3'-phosphate
  modified_base 20: mod_base = OTHER; note = 2'-O-methyluridine-3'-phosphate
  modified_base 21: mod_base = OTHER; note = 2'-O-methyluridine-3'-phosphate N-[tris(N-acetylgalactosamine-alkyl)-amidodecanoyl)]-4-hydr oxyprolinol Hyp-(GalNAc-alkyl)3
cagacactgtctgagcaggtt

SEQ ID NO: 311 - RNA, 21 nt, synthetic construct
  source 1..21: mol_type = other RNA; note = Description of Artificial Sequence: Synthetic oligonucleotide
  modified_base 1: mod_base = OTHER; note = 2'-O-methylcytidine-3'- phosphorothioate
  modified_base 2: mod_base = OTHER; note = 2'-O-methyladenosine-3'- phosphorothioate
  modified_base 3: mod_base = OTHER; note = 2'-O-methylguanosine-3'-phosphate
  modified_base 4: mod_base = OTHER; note = 2'-O-methylguanosine-3'-phosphate
  modified_base 5: mod_base = OTHER; note = 2'-O-methyladenosine-3'-phosphate
  modified_base 6: mod_base = OTHER; note = 2'-O-methylguanosine-3'-phosphate
  modified_base 7: mod_base = OTHER; note = 2'-fluoroguanosine-3'-phosphate
  modified_base 8: mod_base = OTHER; note = 2'-O-methyladenosine-3'-phosphate
  modified_base 9: mod_base = OTHER; note = 2'-fluoroguanosine-3'-phosphate
  modified_base 10: mod_base = OTHER; note = 2'-fluorocytidine-3'-phosphate
  modified_base 11: mod_base = OTHER; note = 2'-fluorouridine-3'-phosphate
  modified_base 12: mod_base = OTHER; note = 2'-O-methylguanosine-3'-phosphate
  modified_base 13: mod_base = OTHER; note = 2'-O-methylcytidine-3'-phosphate
  modified_base 14: mod_base = OTHER; note = 2'-O-methyluridine-3'-phosphate
  modified_base 15: mod_base = OTHER; note = 2'-O-methylcytidine-3'-phosphate
  modified_base 16: mod_base = OTHER; note = 2'-O-methyladenosine-3'-phosphate
  modified_base 17: mod_base = OTHER; note = 2'-O-methylguanosine-3'-phosphate
  modified_base 18: mod_base = OTHER; note = 2'-O-methylcytidine-3'-phosphate
  modified_base 19: mod_base = OTHER; note = 2'-O-methyluridine-3'-phosphate
  modified_base 20: mod_base = OTHER; note = 2'-O-methylcytidine-3'-phosphate
  modified_base 21: mod_base = OTHER; note = 2'-O-methyluridine-3'-phosphate N-[tris(N-acetylgalactosamine-alkyl)-amidodecanoyl)]-4-hydr oxyprolinol Hyp-(GalNAc-alkyl)3
caggaggagctgctcagctct

SEQ ID NO: 312 - RNA, 21 nt, synthetic construct
  source 1..21: mol_type = other RNA; note = Description of Artificial Sequence: Synthetic oligonucleotide
  modified_base 1: mod_base = OTHER; note = 2'-O-methylcytidine-3'- phosphorothioate
  modified_base 2: mod_base = OTHER; note = 2'-O-methyluridine-3'-phosphorothioate
  modified_base 3: mod_base = OTHER; note = 2'-O-methylguanosine-3'-phosphate
  modified_base 4: mod_base = OTHER; note = 2'-O-methylcytidine-3'-phosphate
  modified_base 5: mod_base = OTHER; note = 2'-O-methyluridine-3'-phosphate
  modified_base 6: mod_base = OTHER; note = 2'-O-methylcytidine-3'-phosphate
  modified_base 7: mod_base = OTHER; note = 2'-fluoroadenosine-3'-phosphate
  modified_base 8: mod_base = OTHER; note = 2'-O-methylguanosine-3'-phosphate
  modified_base 9: mod_base = OTHER; note = 2'-fluorocytidine-3'-phosphate
  modified_base 10: mod_base = OTHER; note = 2'-fluorouridine-3'-phosphate
  modified_base 11: mod_base = OTHER; note = 2'-fluorocytidine-3'-phosphate
  modified_base 12: mod_base = OTHER; note = 2'-O-methylcytidine-3'-phosphate
  modified_base 13: mod_base = OTHER; note = 2'-O-methylcytidine-3'-phosphate
  modified_base 14: mod_base = OTHER; note = 2'-O-methyladenosine-3'-phosphate
  modified_base 15: mod_base = OTHER; note = 2'-O-methylguanosine-3'-phosphate
  modified_base 16: mod_base = OTHER; note = 2'-O-methylguanosine-3'-phosphate
  modified_base 17: mod_base = OTHER; note = 2'-O-methyluridine-3'-phosphate
  modified_base 18: mod_base = OTHER; note = 2'-O-methylcytidine-3'-phosphate
  modified_base 19: mod_base = OTHER; note = 2'-O-methyladenosine-3'-phosphate
  modified_base 20: mod_base = OTHER; note = 2'-O-methylcytidine-3'-phosphate
  modified_base 21: mod_base = OTHER; note = 2'-O-methyluridine-3'-phosphate N-[tris(N-acetylgalactosamine-alkyl)-amidodecanoyl)]-4-hydr oxyprolinol Hyp-(GalNAc-alkyl)3
ctgctcagctcccaggtcact

SEQ ID NO: 313 - RNA, 21 nt, synthetic construct
  source 1..21: mol_type = other RNA; note = Description of Artificial Sequence: Synthetic oligonucleotide
  modified_base 1: mod_base = OTHER; note = 2'-O-methyluridine-3'-phosphorothioate
  modified_base 2: mod_base = OTHER; note = 2'-O-methylcytidine-3'- phosphorothioate
  modified_base 3: mod_base = OTHER; note = 2'-O-methylcytidine-3'-phosphate
  modified_base 4: mod_base = OTHER; note = 2'-O-methylcytidine-3'-phosphate
  modified_base 5: mod_base = OTHER; note = 2'-O-methyladenosine-3'-phosphate
  modified_base 6: mod_base = OTHER; note = 2'-O-methylguanosine-3'-phosphate
  modified_base 7: mod_base = OTHER; note = 2'-fluoroguanosine-3'-phosphate
  modified_base 8: mod_base = OTHER; note = 2'-O-methyluridine-3'-phosphate
  modified_base 9: mod_base = OTHER; note = 2'-fluorocytidine-3'-phosphate
  modified_base 10: mod_base = OTHER; note = 2'-fluoroadenosine-3'-phosphate
  modified_base 11: mod_base = OTHER; note = 2'-fluorocytidine-3'-phosphate
  modified_base 12: mod_base = OTHER; note = 2'-O-methylcytidine-3'-phosphate
  modified_base 13: mod_base = OTHER; note = 2'-O-methylcytidine-3'-phosphate
  modified_base 14: mod_base = OTHER; note = 2'-O-methyladenosine-3'-phosphate
  modified_base 15: mod_base = OTHER; note = 2'-O-methylguanosine-3'-phosphate
  modified_base 16: mod_base = OTHER; note = 2'-O-methylguanosine-3'-phosphate
  modified_base 17: mod_base = OTHER; note = 2'-O-methyladenosine-3'-phosphate
  modified_base 18: mod_base = OTHER; note = 2'-O-methyladenosine-3'-phosphate
  modified_base 19: mod_base = OTHER; note = 2'-O-methylcytidine-3'-phosphate
  modified_base 20: mod_base = OTHER; note = 2'-O-methyluridine-3'-phosphate
  modified_base 21: mod_base = OTHER; note = 2'-O-methyluridine-3'-phosphate N-[tris(N-acetylgalactosamine-alkyl)-amidodecanoyl)]-4-hydr oxyprolinol Hyp-(GalNAc-alkyl)3
tcccaggtcacccaggaactt

SEQ ID NO: 314 - RNA, 21 nt, synthetic construct
  source 1..21: mol_type = other RNA; note = Description of Artificial Sequence: Synthetic oligonucleotide
  modified_base 1: mod_base = OTHER; note = 2'-O-methyladenosine-3'- phosphorothioate
  modified_base 2: mod_base = OTHER; note = 2'-O-methylcytidine-3'- phosphorothioate
  modified_base 3: mod_base = OTHER; note = 2'-O-methylcytidine-3'-phosphate
  modified_base 4: mod_base = OTHER; note = 2'-O-methylcytidine-3'-phosphate
  modified_base 5: mod_base = OTHER; note = 2'-O-methyladenosine-3'-phosphate
  modified_base 6: mod_base = OTHER; note = 2'-O-methylguanosine-3'-phosphate
  modified_base 7: mod_base = OTHER; note = 2'-fluoroguanosine-3'-phosphate
  modified_base 8: mod_base = OTHER; note = 2'-O-methyladenosine-3'-phosphate
  modified_base 9: mod_base = OTHER; note = 2'-fluoroadenosine-3'-phosphate
  modified_base 10: mod_base = OTHER; note = 2'-fluorocytidine-3'-phosphate
  modified_base 11: mod_base = OTHER; note = 2'-fluorouridine-3'-phosphate
  modified_base 12: mod_base = OTHER; note = 2'-O-methylguanosine-3'-phosphate
  modified_base 13: mod_base = OTHER; note = 2'-O-methyladenosine-3'-phosphate
  modified_base 14: mod_base = OTHER; note = 2'-O-methylguanosine-3'-phosphate
  modified_base 15: mod_base = OTHER; note = 2'-O-methylguanosine-3'-phosphate
  modified_base 16: mod_base = OTHER; note = 2'-O-methylguanosine-3'-phosphate
  modified_base 17: mod_base = OTHER; note = 2'-O-methylcytidine-3'-phosphate
  modified_base 18: mod_base = OTHER; note = 2'-O-methylguanosine-3'-phosphate
  modified_base 19: mod_base = OTHER; note = 2'-O-methylcytidine-3'-phosphate
  modified_base 20: mod_base = OTHER; note = 2'-O-methyluridine-3'-phosphate
  modified_base 21: mod_base = OTHER; note = 2'-O-methyluridine-3'-phosphate N-[tris(N-acetylgalactosamine-alkyl)-amidodecanoyl)]-4-hydr oxyprolinol Hyp-(GalNAc-alkyl)3
acccaggaactgagggcgctt

SEQ ID NO: 315 - RNA, 21 nt, synthetic construct
  source 1..21: mol_type = other RNA; note = Description of Artificial Sequence: Synthetic oligonucleotide
  modified_base 1: mod_base = OTHER; note = 2'-O-methyluridine-3'-phosphorothioate
  modified_base 2: mod_base = OTHER; note = 2'-O-methylguanosine-3'- phosphorothioate
  modified_base 3: mod_base = OTHER; note = 2'-O-methyladenosine-3'-phosphate
  modified_base 4: mod_base = OTHER; note = 2'-O-methylguanosine-3'-phosphate
  modified_base 5: mod_base = OTHER; note = 2'-O-methylguanosine-3'-phosphate
  modified_base 6: mod_base = OTHER; note = 2'-O-methylguanosine-3'-phosphate
  modified_base 7: mod_base = OTHER; note = 2'-fluorocytidine-3'-phosphate
  modified_base 8: mod_base = OTHER; note = 2'-O-methylguanosine-3'-phosphate
  modified_base 9: mod_base = OTHER; note = 2'-fluorocytidine-3'-phosphate
  modified_base 10: mod_base = OTHER; note = 2'-fluorouridine-3'-phosphate
  modified_base 11: mod_base = OTHER; note = 2'-fluoroguanosine-3'-phosphate
  modified_base 12: mod_base = OTHER; note = 2'-O-methyladenosine-3'-phosphate
  modified_base 13: mod_base = OTHER; note = 2'-O-methyluridine-3'-phosphate
  modified_base 14: mod_base = OTHER; note = 2'-O-methylguanosine-3'-phosphate
  modified_base 15: mod_base = OTHER; note = 2'-O-methylguanosine-3'-phosphate
  modified_base 16: mod_base = OTHER; note = 2'-O-methyladenosine-3'-phosphate
  modified_base 17: mod_base = OTHER; note = 2'-O-methylcytidine-3'-phosphate
  modified_base 18: mod_base = OTHER; note = 2'-O-methylguanosine-3'-phosphate
  modified_base 19: mod_base = OTHER; note = 2'-O-methyladenosine-3'-phosphate
  modified_base 20: mod_base = OTHER; note = 2'-O-methylguanosine-3'-phosphate
  modified_base 21: mod_base = OTHER; note = 2'-O-methyluridine-3'-phosphate N-[tris(N-acetylgalactosamine-alkyl)-amidodecanoyl)]-4-hydr oxyprolinol Hyp-(GalNAc-alkyl)3
tgagggcgctgatggacgagt

SEQ ID NO: 316 - RNA, 21 nt, synthetic construct
  source 1..21: mol_type = other RNA; note = Description of Artificial Sequence: Synthetic oligonucleotide
  modified_base 1: mod_base = OTHER; note = 2'-O-methylguanosine-3'- phosphorothioate
  modified_base 2: mod_base = OTHER; note = 2'-O-methylcytidine-3'- phosphorothioate
  modified_base 3: mod_base = OTHER; note = 2'-O-methylguanosine-3'-phosphate
  modified_base 4: mod_base = OTHER; note = 2'-O-methylcytidine-3'-phosphate
  modified_base 5: mod_base = OTHER; note = 2'-O-methyluridine-3'-phosphate
  modified_base 6: mod_base = OTHER; note = 2'-O-methylguanosine-3'-phosphate
  modified_base 7: mod_base = OTHER; note = 2'-fluoroadenosine-3'-phosphate
  modified_base 8: mod_base = OTHER; note = 2'-O-methyluridine-3'-phosphate
  modified_base 9: mod_base = OTHER; note = 2'-fluoroguanosine-3'-phosphate
  modified_base 10: mod_base = OTHER; note = 2'-fluoroguanosine-3'-phosphate
  modified_base 11: mod_base = OTHER; note = 2'-fluoroadenosine-3'-phosphate
  modified_base 12: mod_base = OTHER; note = 2'-O-methylcytidine-3'-phosphate
  modified_base 13: mod_base = OTHER; note = 2'-O-methylguanosine-3'-phosphate
  modified_base 14: mod_base = OTHER; note = 2'-O-methyladenosine-3'-phosphate
  modified_base 15: mod_base = OTHER; note = 2'-O-methylguanosine-3'-phosphate
  modified_base 16: mod_base = OTHER; note = 2'-O-methyladenosine-3'-phosphate
  modified_base 17: mod_base = OTHER; note = 2'-O-methylcytidine-3'-phosphate
  modified_base 18: mod_base = OTHER; note = 2'-O-methylcytidine-3'-phosphate
  modified_base 19: mod_base = OTHER; note = 2'-O-methyladenosine-3'-phosphate
  modified_base 20: mod_base = OTHER; note = 2'-O-methyluridine-3'-phosphate
  modified_base 21: mod_base = OTHER; note = 2'-O-methyluridine-3'-phosphate N-[tris(N-acetylgalactosamine-alkyl)-amidodecanoyl)]-4-hydr oxyprolinol Hyp-(GalNAc-alkyl)3
gcgctgatggacgagaccatt

SEQ ID NO: 317 - RNA, 21 nt, synthetic construct
  source 1..21: mol_type = other RNA; note = Description of Artificial Sequence: Synthetic oligonucleotide
  modified_base 1: mod_base = OTHER; note = 2'-O-methylguanosine-3'- phosphorothioate
  modified_base 2: mod_base = OTHER; note = 2'-O-methyladenosine-3'- phosphorothioate
  modified_base 3: mod_base = OTHER; note = 2'-O-methylcytidine-3'-phosphate
  modified_base 4: mod_base = OTHER; note = 2'-O-methylguanosine-3'-phosphate
  modified_base 5: mod_base = OTHER; note = 2'-O-methyladenosine-3'-phosphate
  modified_base 6: mod_base = OTHER; note = 2'-O-methylguanosine-3'-phosphate
  modified_base 7: mod_base = OTHER; note = 2'-fluoroadenosine-3'-phosphate
  modified_base 8: mod_base = OTHER; note = 2'-O-methylcytidine-3'-phosphate
  modified_base 9: mod_base = OTHER; note = 2'-fluorocytidine-3'-phosphate
  modified_base 10: mod_base = OTHER; note = 2'-fluoroadenosine-3'-phosphate
  modified_base 11: mod_base = OTHER; note = 2'-fluorouridine-3'-phosphate
  modified_base 12: mod_base = OTHER; note = 2'-O-methylguanosine-3'-phosphate
  modified_base 13: mod_base = OTHER; note = 2'-O-methyladenosine-3'-phosphate
  modified_base 14: mod_base = OTHER; note = 2'-O-methyladenosine-3'-phosphate
  modified_base 15: mod_base = OTHER; note = 2'-O-methylguanosine-3'-phosphate
  modified_base 16: mod_base = OTHER; note = 2'-O-methylguanosine-3'-phosphate
  modified_base 17: mod_base = OTHER; note = 2'-O-methyladenosine-3'-phosphate
  modified_base 18: mod_base = OTHER; note = 2'-O-methylguanosine-3'-phosphate
  modified_base 19: mod_base = OTHER; note = 2'-O-methyluridine-3'-phosphate
  modified_base 20: mod_base = OTHER; note = 2'-O-methyluridine-3'-phosphate
  modified_base 21: mod_base = OTHER; note = 2'-O-methyluridine-3'-phosphate N-[tris(N-acetylgalactosamine-alkyl)-amidodecanoyl)]-4-hydr oxyprolinol Hyp-(GalNAc-alkyl)3
gacgagaccatgaaggagttt

SEQ ID NO: 318 - RNA, 21 nt, synthetic construct
  source 1..21: mol_type = other RNA; note = Description of Artificial Sequence: Synthetic oligonucleotide
  modified_base 1: mod_base = OTHER; note = 2'-O-methyladenosine-3'- phosphorothioate
  modified_base 2: mod_base = OTHER; note = 2'-O-methylcytidine-3'- phosphorothioate
  modified_base 3: mod_base = OTHER; note = 2'-O-methylcytidine-3'-phosphate
  modified_base 4: mod_base = OTHER; note = 2'-O-methyladenosine-3'-phosphate
  modified_base 5: mod_base = OTHER; note = 2'-O-methyluridine-3'-phosphate
  modified_base 6: mod_base = OTHER; note = 2'-O-methylguanosine-3'-phosphate
  modified_base 7: mod_base = OTHER; note = 2'-fluoroadenosine-3'-phosphate
  modified_base 8: mod_base = OTHER; note = 2'-O-methyladenosine-3'-phosphate
  modified_base 9: mod_base = OTHER; note = 2'-fluoroguanosine-3'-phosphate
  modified_base 10: mod_base = OTHER; note = 2'-fluoroguanosine-3'-phosphate
  modified_base 11: mod_base = OTHER; note = 2'-fluoroadenosine-3'-phosphate
  modified_base 12: mod_base = OTHER; note = 2'-O-methylguanosine-3'-phosphate
  modified_base 13: mod_base = OTHER; note = 2'-O-methyluridine-3'-phosphate
  modified_base 14: mod_base = OTHER; note = 2'-O-methyluridine-3'-phosphate
  modified_base 15: mod_base = OTHER; note = 2'-O-methylguanosine-3'-phosphate
  modified_base 16: mod_base = OTHER; note = 2'-O-methyladenosine-3'-phosphate
  modified_base 17: mod_base = OTHER; note = 2'-O-methyladenosine-3'-phosphate
  modified_base 18: mod_base = OTHER; note = 2'-O-methylguanosine-3'-phosphate
  modified_base 19: mod_base = OTHER; note = 2'-O-methylguanosine-3'-phosphate
  modified_base 20: mod_base = OTHER; note = 2'-O-methylcytidine-3'-phosphate
  modified_base 21: mod_base = OTHER; note = 2'-O-methyluridine-3'-phosphate N-[tris(N-acetylgalactosamine-alkyl)-amidodecanoyl)]-4-hydr oxyprolinol Hyp-(GalNAc-alkyl)3
accatgaaggagttgaaggct

SEQ ID NO: 319 - RNA, 21 nt, synthetic construct
  source 1..21: mol_type = other RNA; note = Description of Artificial Sequence: Synthetic oligonucleotide
  modified_base 1: mod_base = OTHER; note = 2'-O-methylguanosine-3'- phosphorothioate
  modified_base 2: mod_base = OTHER; note = 2'-O-methylguanosine-3'- phosphorothioate
  modified_base 3: mod_base = OTHER; note = 2'-O-methyladenosine-3'-phosphate
  modified_base 4: mod_base = OTHER; note = 2'-O-methylguanosine-3'-phosphate
  modified_base 5: mod_base = OTHER; note = 2'-O-methyluridine-3'-phosphate
  modified_base 6: mod_base = OTHER; note = 2'-O-methyluridine-3'-phosphate
  modified_base 7: mod_base = OTHER; note = 2'-fluoroguanosine-3'-phosphate
  modified_base 8: mod_base = OTHER; note = 2'-O-methyladenosine-3'-phosphate
  modified_base 9: mod_base = OTHER; note = 2'-fluoroadenosine-3'-phosphate
  modified_base 10: mod_base = OTHER; note = 2'-fluoroguanosine-3'-phosphate
  modified_base 11: mod_base = OTHER; note = 2'-fluoroguanosine-3'-phosphate
  modified_base 12: mod_base = OTHER; note = 2'-O-methylcytidine-3'-phosphate
  modified_base 13: mod_base = OTHER; note = 2'-O-methylcytidine-3'-phosphate
  modified_base 14: mod_base = OTHER; note = 2'-O-methyluridine-3'-phosphate
  modified_base 15: mod_base = OTHER; note = 2'-O-methyladenosine-3'-phosphate
  modified_base 16: mod_base = OTHER; note = 2'-O-methylcytidine-3'-phosphate
  modified_base 17: mod_base = OTHER; note = 2'-O-methyladenosine-3'-phosphate
  modified_base 18: mod_base = OTHER; note = 2'-O-methyladenosine-3'-phosphate
  modified_base 19: mod_base = OTHER; note = 2'-O-methyladenosine-3'-phosphate
  modified_base 20: mod_base = OTHER; note = 2'-O-methyluridine-3'-phosphate
  modified_base 21: mod_base = OTHER; note = 2'-O-methyluridine-3'-phosphate N-[tris(N-acetylgalactosamine-alkyl)-amidodecanoyl)]-4-hydr oxyprolinol Hyp-(GalNAc-alkyl)3
ggagttgaaggcctacaaatt

SEQ ID NO: 320 - RNA, 21 nt, synthetic construct
  source 1..21: mol_type = other RNA; note = Description of Artificial Sequence: Synthetic oligonucleotide
  modified_base 1: mod_base = OTHER; note = 2'-O-methyladenosine-3'- phosphorothioate
  modified_base 2: mod_base = OTHER; note = 2'-O-methyladenosine-3'- phosphorothioate
  modified_base 3: mod_base = OTHER; note = 2'-O-methylguanosine-3'-phosphate
  modified_base 4: mod_base = OTHER; note = 2'-O-methylguanosine-3'-phosphate
  modified_base 5: mod_base = OTHER; note = 2'-O-methylcytidine-3'-phosphate
  modified_base 6: mod_base = OTHER; note = 2'-O-methylcytidine-3'-phosphate
  modified_base 7: mod_base = OTHER; note = 2'-fluorouridine-3'-phosphate
  modified_base 8: mod_base = OTHER; note = 2'-O-methyladenosine-3'-phosphate
  modified_base 9: mod_base = OTHER; note = 2'-fluorocytidine-3'-phosphate
  modified_base 10: mod_base = OTHER; note = 2'-fluoroadenosine-3'-phosphate
  modified_base 11: mod_base = OTHER; note = 2'-fluoroadenosine-3'-phosphate
  modified_base 12: mod_base = OTHER; note = 2'-O-methyladenosine-3'-phosphate
  modified_base 13: mod_base = OTHER; note = 2'-O-methyluridine-3'-phosphate
  modified_base 14: mod_base = OTHER; note = 2'-O-methylcytidine-3'-phosphate
  modified_base 15: mod_base = OTHER; note = 2'-O-methylguanosine-3'-phosphate
  modified_base 16: mod_base = OTHER; note = 2'-O-methylguanosine-3'-phosphate
  modified_base 17: mod_base = OTHER; note = 2'-O-methyladenosine-3'-phosphate
  modified_base 18: mod_base = OTHER; note = 2'-O-methyladenosine-3'-phosphate
  modified_base 19: mod_base = OTHER; note = 2'-O-methylcytidine-3'-phosphate
  modified_base 20: mod_base = OTHER; note = 2'-O-methyluridine-3'-phosphate
  modified_base 21: mod_base = OTHER; note = 2'-O-methyluridine-3'-phosphate N-[tris(N-acetylgalactosamine-alkyl)-amidodecanoyl)]-4-hydr oxyprolinol Hyp-(GalNAc-alkyl)3
aaggcctacaaatcggaactt

SEQ ID NO: 321 - RNA, 21 nt, synthetic construct
  source 1..21: mol_type = other RNA; note = Description of Artificial Sequence: Synthetic oligonucleotide
  modified_base 1: mod_base = OTHER; note = 2'-O-methyladenosine-3'- phosphorothioate
  modified_base 2: mod_base = OTHER; note = 2'-O-methylcytidine-3'- phosphorothioate
  modified_base 3: mod_base = OTHER; note = 2'-O-methyladenosine-3'-phosphate
  modified_base 4: mod_base = OTHER; note = 2'-O-methyladenosine-3'-phosphate
  modified_base 5: mod_base = OTHER; note = 2'-O-methyladenosine-3'-phosphate
  modified_base 6: mod_base = OTHER; note = 2'-O-methyluridine-3'-phosphate
  modified_base 7: mod_base = OTHER; note = 2'-fluorocytidine-3'-phosphate
  modified_base 8: mod_base = OTHER; note = 2'-O-methylguanosine-3'-phosphate
  modified_base 9: mod_base = OTHER; note = 2'-fluoroguanosine-3'-phosphate
  modified_base 10: mod_base = OTHER; note = 2'-fluoroadenosine-3'-phosphate
  modified_base 11: mod_base = OTHER; note = 2'-fluoroadenosine-3'-phosphate
  modified_base 12: mod_base = OTHER; note = 2'-O-methylcytidine-3'-phosphate
  modified_base 13: mod_base = OTHER; note = 2'-O-methyluridine-3'-phosphate
  modified_base 14: mod_base = OTHER; note = 2'-O-methylguanosine-3'-phosphate
  modified_base 15: mod_base = OTHER; note = 2'-O-methylguanosine-3'-phosphate
  modified_base 16: mod_base = OTHER; note = 2'-O-methyladenosine-3'-phosphate
  modified_base 17: mod_base = OTHER; note = 2'-O-methylguanosine-3'-phosphate
  modified_base 18: mod_base = OTHER; note = 2'-O-methylguanosine-3'-phosphate
  modified_base 19: mod_base = OTHER; note = 2'-O-methyladenosine-3'-phosphate
  modified_base 20: mod_base = OTHER; note = 2'-O-methyladenosine-3'-phosphate
  modified_base 21: mod_base = OTHER; note = 2'-O-methyluridine-3'-phosphate N-[tris(N-acetylgalactosamine-alkyl)-amidodecanoyl)]-4-hydr oxyprolinol Hyp-(GalNAc-alkyl)3
acaaatcggaactggaggaat

SEQ ID NO: 322 - RNA, 21 nt, synthetic construct
  source 1..21: mol_type = other RNA; note = Description of Artificial Sequence: Synthetic oligonucleotide
  modified_base 1: mod_base = OTHER; note = 2'-O-methyluridine-3'-phosphorothioate
  modified_base 2: mod_base = OTHER; note = 2'-O-methylcytidine-3'- phosphorothioate
  modified_base 3: mod_base = OTHER; note = 2'-O-methylguanosine-3'-phosphate
  modified_base 4: mod_base = OTHER; note = 2'-O-methylguanosine-3'-phosphate
  modified_base 5: mod_base = OTHER; note = 2'-O-methyladenosine-3'-phosphate
  modified_base 6: mod_base = OTHER; note = 2'-O-methyladenosine-3'-phosphate
  modified_base 7: mod_base = OTHER; note = 2'-fluorocytidine-3'-phosphate
  modified_base 8: mod_base = OTHER; note = 2'-O-methyluridine-3'-phosphate
  modified_base 9: mod_base = OTHER; note = 2'-fluoroguanosine-3'-phosphate
  modified_base 10: mod_base = OTHER; note = 2'-fluoroguanosine-3'-phosphate
  modified_base 11: mod_base = OTHER; note = 2'-fluoroadenosine-3'-phosphate
  modified_base 12: mod_base = OTHER; note = 2'-O-methylguanosine-3'-phosphate
  modified_base 13: mod_base = OTHER; note = 2'-O-methylguanosine-3'-phosphate
  modified_base 14: mod_base = OTHER; note = 2'-O-methyladenosine-3'-phosphate
  modified_base 15: mod_base = OTHER; note = 2'-O-methyladenosine-3'-phosphate
  modified_base 16: mod_base = OTHER; note = 2'-O-methylcytidine-3'-phosphate
  modified_base 17: mod_base = OTHER; note = 2'-O-methyladenosine-3'-phosphate
  modified_base 18: mod_base = OTHER; note = 2'-O-methyladenosine-3'-phosphate
  modified_base 19: mod_base = OTHER; note = 2'-O-methylcytidine-3'-phosphate
  modified_base 20: mod_base = OTHER; note = 2'-O-methyluridine-3'-phosphate
  modified_base 21: mod_base = OTHER; note = 2'-O-methyluridine-3'-phosphate N-[tris(N-acetylgalactosamine-alkyl)-amidodecanoyl)]-4-hydr oxyprolinol Hyp-(GalNAc-alkyl)3
tcggaactggaggaacaactt

SEQ ID NO: 323 - RNA, 21 nt, synthetic construct
  source 1..21: mol_type = other RNA; note = Description of Artificial Sequence: Synthetic oligonucleotide
  modified_base 1: mod_base = OTHER; note = 2'-O-methylguanosine-3'- phosphorothioate
  modified_base 2: mod_base = OTHER; note = 2'-O-methyladenosine-3'- phosphorothioate
  modified_base 3: mod_base = OTHER; note = 2'-O-methylguanosine-3'-phosphate
  modified_base 4: mod_base = OTHER; note = 2'-O-methylguanosine-3'-phosphate
  modified_base 5: mod_base = OTHER; note = 2'-O-methyladenosine-3'-phosphate
  modified_base 6: mod_base = OTHER; note = 2'-O-methyladenosine-3'-phosphate
  modified_base 7: mod_base = OTHER; note = 2'-fluorocytidine-3'-phosphate
  modified_base 8: mod_base = OTHER; note = 2'-O-methyladenosine-3'-phosphate
  modified_base 9: mod_base = OTHER; note = 2'-fluoroadenosine-3'-phosphate
  modified_base 10: mod_base = OTHER; note = 2'-fluorocytidine-3'-phosphate
  modified_base 11: mod_base = OTHER; note = 2'-fluorouridine-3'-phosphate
  modified_base 12: mod_base = OTHER; note = 2'-O-methylguanosine-3'-phosphate
  modified_base 13: mod_base = OTHER; note = 2'-O-methyladenosine-3'-phosphate
  modified_base 14: mod_base = OTHER; note = 2'-O-methylcytidine-3'-phosphate
  modified_base 15: mod_base = OTHER; note = 2'-O-methylcytidine-3'-phosphate
  modified_base 16: mod_base = OTHER; note = 2'-O-methylcytidine-3'-phosphate
  modified_base 17: mod_base = OTHER; note = 2'-O-methylcytidine-3'-phosphate
  modified_base 18: mod_base = OTHER; note = 2'-O-methylguanosine-3'-phosphate
  modified_base 19: mod_base = OTHER; note = 2'-O-methylguanosine-3'-phosphate
  modified_base 20: mod_base = OTHER; note = 2'-O-methyluridine-3'-phosphate
  modified_base 21: mod_base = OTHER; note = 2'-O-methyluridine-3'-phosphate N-[tris(N-acetylgalactosamine-alkyl)-amidodecanoyl)]-4-hydr oxyprolinol Hyp-(GalNAc-alkyl)3
gaggaacaactgaccccggtt

SEQ ID NO: 324 - RNA, 21 nt, synthetic construct
  source 1..21: mol_type = other RNA; note = Description of Artificial Sequence: Synthetic oligonucleotide
  modified_base 1: mod_base = OTHER; note = 2'-O-methylcytidine-3'- phosphorothioate
  modified_base 2: mod_base = OTHER; note = 2'-O-methylguanosine-3'- phosphorothioate
  modified_base 3: mod_base = OTHER; note = 2'-O-methylcytidine-3'-phosphate
  modified_base 4: mod_base = OTHER; note = 2'-O-methylguanosine-3'-phosphate
  modified_base 5: mod_base = OTHER; note = 2'-O-methylguanosine-3'-phosphate
  modified_base 6: mod_base = OTHER; note = 2'-O-methylguanosine-3'-phosphate
  modified_base 7: mod_base = OTHER; note = 2'-fluorocytidine-3'-phosphate
  modified_base 8: mod_base = OTHER; note = 2'-O-methyladenosine-3'-phosphate
  modified_base 9: mod_base = OTHER; note = 2'-fluorocytidine-3'-phosphate
  modified_base 10: mod_base = OTHER; note = 2'-fluoroguanosine-3'-phosphate
  modified_base 11: mod_base = OTHER; note = 2'-fluoroguanosine-3'-phosphate
  modified_base 12: mod_base = OTHER; note = 2'-O-methylcytidine-3'-phosphate
  modified_base 13: mod_base = OTHER; note = 2'-O-methyluridine-3'-phosphate
  modified_base 14: mod_base = OTHER; note = 2'-O-methylguanosine-3'-phosphate
  modified_base 15: mod_base = OTHER; note = 2'-O-methyluridine-3'-phosphate
  modified_base 16: mod_base = OTHER; note = 2'-O-methylcytidine-3'-phosphate
  modified_base 17: mod_base = OTHER; note = 2'-O-methylcytidine-3'-phosphate
  modified_base 18: mod_base = OTHER; note = 2'-O-methyladenosine-3'-phosphate
  modified_base 19: mod_base = OTHER; note = 2'-O-methyladenosine-3'-phosphate
  modified_base 20: mod_base = OTHER; note = 2'-O-methylguanosine-3'-phosphate
  modified_base 21: mod_base = OTHER; note = 2'-O-methyluridine-3'-phosphate N-[tris(N-acetylgalactosamine-alkyl)-amidodecanoyl)]-4-hydr oxyprolinol Hyp-(GalNAc-alkyl)3
cgcgggcacggctgtccaagt

SEQ ID NO: 325 - RNA, 21 nt, synthetic construct
  source 1..21: mol_type = other RNA; note = Description of Artificial Sequence: Synthetic oligonucleotide
  modified_base 1: mod_base = OTHER; note = 2'-O-methylguanosine-3'- phosphorothioate
  modified_base 2: mod_base = OTHER; note = 2'-O-methylcytidine-3'- phosphorothioate
  modified_base 3: mod_base = OTHER; note = 2'-O-methyladenosine-3'-phosphate
  modified_base 4: mod_base = OTHER; note = 2'-O-methylcytidine-3'-phosphate
  modified_base 5: mod_base = OTHER; note = 2'-O-methylguanosine-3'-phosphate
  modified_base 6: mod_base = OTHER; note = 2'-O-methylguanosine-3'-phosphate
  modified_base 7: mod_base = OTHER; note = 2'-fluorocytidine-3'-phosphate
  modified_base 8: mod_base = OTHER; note = 2'-O-methyluridine-3'-phosphate
  modified_base 9: mod_base = OTHER; note = 2'-fluoroguanosine-3'-phosphate
  modified_base 10: mod_base = OTHER; note = 2'-fluorouridine-3'-phosphate
  modified_base 11: mod_base = OTHER; note = 2'-fluorocytidine-3'-phosphate
  modified_base 12: mod_base = OTHER; note = 2'-O-methylcytidine-3'-phosphate
  modified_base 13: mod_base = OTHER; note = 2'-O-methyladenosine-3'-phosphate
  modified_base 14: mod_base = OTHER; note = 2'-O-methyladenosine-3'-phosphate
  modified_base 15: mod_base = OTHER; note = 2'-O-methylguanosine-3'-phosphate
  modified_base 16: mod_base = OTHER; note = 2'-O-methylguanosine-3'-phosphate
  modified_base 17: mod_base = OTHER; note = 2'-O-methyladenosine-3'-phosphate
  modified_base 18: mod_base = OTHER; note = 2'-O-methylguanosine-3'-phosphate
  modified_base 19: mod_base = OTHER; note = 2'-O-methylcytidine-3'-phosphate
  modified_base 20: mod_base = OTHER; note = 2'-O-methyluridine-3'-phosphate
  modified_base 21: mod_base = OTHER; note = 2'-O-methyluridine-3'-phosphate N-[tris(N-acetylgalactosamine-alkyl)-amidodecanoyl)]-4-hydr oxyprolinol Hyp-(GalNAc-alkyl)3
gcacggctgtccaaggagctt

SEQ ID NO: 326 - RNA, 21 nt, synthetic construct
  source 1..21: mol_type = other RNA; note = Description of Artificial Sequence: Synthetic oligonucleotide
  modified_base 1: mod_base = OTHER; note = 2'-O-methylguanosine-3'- phosphorothioate
  modified_base 2: mod_base = OTHER; note = 2'-O-methylcytidine-3'- phosphorothioate
  modified_base 3: mod_base = OTHER; note = 2'-O-methyluridine-3'-phosphate
  modified_base 4: mod_base = OTHER; note = 2'-O-methylguanosine-3'-phosphate
  modified_base 5: mod_base = OTHER; note = 2'-O-methyluridine-3'-phosphate
  modified_base 6: mod_base = OTHER; note = 2'-O-methylcytidine-3'-phosphate
  modified_base 7: mod_base = OTHER; note = 2'-fluorocytidine-3'-phosphate
  modified_base 8: mod_base = OTHER; note = 2'-O-methyladenosine-3'-phosphate
  modified_base 9: mod_base = OTHER; note = 2'-fluoroadenosine-3'-phosphate
  modified_base 10: mod_base = OTHER; note = 2'-fluoroguanosine-3'-phosphate
  modified_base 11: mod_base = OTHER; note = 2'-fluoroguanosine-3'-phosphate
  modified_base 12: mod_base = OTHER; note = 2'-O-methyladenosine-3'-phosphate
  modified_base 13: mod_base = OTHER; note = 2'-O-methylguanosine-3'-phosphate
  modified_base 14: mod_base = OTHER; note = 2'-O-methylcytidine-3'-phosphate
  modified_base 15: mod_base = OTHER; note = 2'-O-methyluridine-3'-phosphate
  modified_base 16: mod_base = OTHER; note = 2'-O-methylguanosine-3'-phosphate
  modified_base 17: mod_base = OTHER; note = 2'-O-methylcytidine-3'-phosphate
  modified_base 18: mod_base = OTHER; note = 2'-O-methyladenosine-3'-phosphate
  modified_base 19: mod_base = OTHER; note = 2'-O-methylguanosine-3'-phosphate
  modified_base 20: mod_base = OTHER; note = 2'-O-methylguanosine-3'-phosphate
  modified_base 21: mod_base = OTHER; note = 2'-O-methyluridine-3'-phosphate N-[tris(N-acetylgalactosamine-alkyl)-amidodecanoyl)]-4-hydr oxyprolinol Hyp-(GalNAc-alkyl)3
gctgtccaaggagctgcaggt

SEQ ID NO: 327 - RNA, 21 nt, synthetic construct
  source 1..21: mol_type = other RNA; note = Description of Artificial Sequence: Synthetic oligonucleotide
  modified_base 1: mod_base = OTHER; note = 2'-O-methylguanosine-3'- phosphorothioate
  modified_base 2: mod_base = OTHER; note = 2'-O-methylcytidine-3'- phosphorothioate
  modified_base 3: mod_base = OTHER; note = 2'-O-methylcytidine-3'-phosphate
  modified_base 4: mod_base = OTHER; note = 2'-O-methylcytidine-3'-phosphate
  modified_base 5: mod_base = OTHER; note = 2'-O-methylguanosine-3'-phosphate
  modified_base 6: mod_base = OTHER; note = 2'-O-methylguanosine-3'-phosphate
  modified_base 7: mod_base = OTHER; note = 2'-fluorocytidine-3'-phosphate
  modified_base 8: mod_base = OTHER; note = 2'-O-methyluridine-3'-phosphate
  modified_base 9: mod_base = OTHER; note = 2'-fluoroguanosine-3'-phosphate
  modified_base 10: mod_base = OTHER; note = 2'-fluoroguanosine-3'-phosphate
  modified_base 11: mod_base = OTHER; note = 2'-fluoroguanosine-3'-phosphate
  modified_base 12: mod_base = OTHER; note = 2'-O-methylcytidine-3'-phosphate
  modified_base 13: mod_base = OTHER; note = 2'-O-methylguanosine-3'-phosphate
  modified_base 14: mod_base = OTHER; note = 2'-O-methylcytidine-3'-phosphate
  modified_base 15: mod_base = OTHER; note = 2'-O-methylguanosine-3'-phosphate
  modified_base 16: mod_base = OTHER; note = 2'-O-methylguanosine-3'-phosphate
  modified_base 17: mod_base = OTHER; note = 2'-O-methyladenosine-3'-phosphate
  modified_base 18: mod_base = OTHER; note = 2'-O-methylcytidine-3'-phosphate
  modified_base 19: mod_base = OTHER; note = 2'-O-methyladenosine-3'-phosphate
  modified_base 20: mod_base = OTHER; note = 2'-O-methyluridine-3'-phosphate
  modified_base 21: mod_base = OTHER; note = 2'-O-methyluridine-3'-phosphate N-[tris(N-acetylgalactosamine-alkyl)-amidodecanoyl)]-4-hydr oxyprolinol Hyp-(GalNAc-alkyl)3
gcccggctgggcgcggacatt

SEQ ID NO: 328 - RNA, 21 nt, synthetic construct
  source 1..21: mol_type = other RNA; note = Description of Artificial Sequence: Synthetic oligonucleotide
  modified_base 1: mod_base = OTHER; note = 2'-O-methylcytidine-3'- phosphorothioate
  modified_base 2: mod_base = OTHER; note = 2'-O-methyluridine-3'-phosphorothioate
  modified_base 3: mod_base = OTHER; note = 2'-O-methylguanosine-3'-phosphate
  modified_base 4: mod_base = OTHER; note = 2'-O-methylguanosine-3'-phosphate
  modified_base 5: mod_base = OTHER; note = 2'-O-methylguanosine-3'-phosphate
  modified_base 6: mod_base = OTHER; note = 2'-O-methylcytidine-3'-phosphate
  modified_base 7: mod_base = OTHER; note = 2'-fluoroguanosine-3'-phosphate
  modified_base 8: mod_base = OTHER; note = 2'-O-methylcytidine-3'-phosphate
  modified_base 9: mod_base = OTHER; note = 2'-fluoroguanosine-3'-phosphate
  modified_base 10: mod_base = OTHER; note = 2'-fluoroguanosine-3'-phosphate
  modified_base 11: mod_base = OTHER; note = 2'-fluoroadenosine-3'-phosphate
  modified_base 12: mod_base = OTHER; note = 2'-O-methylcytidine-3'-phosphate
  modified_base 13: mod_base = OTHER; note = 2'-O-methyladenosine-3'-phosphate
  modified_base 14: mod_base = OTHER; note = 2'-O-methyluridine-3'-phosphate
  modified_base 15: mod_base = OTHER; note = 2'-O-methylguanosine-3'-phosphate
  modified_base 16: mod_base = OTHER; note = 2'-O-methylguanosine-3'-phosphate
  modified_base 17: mod_base = OTHER; note = 2'-O-methyladenosine-3'-phosphate
  modified_base 18: mod_base = OTHER; note = 2'-O-methylguanosine-3'-phosphate
  modified_base 19: mod_base = OTHER; note = 2'-O-methylguanosine-3'-phosphate
  modified_base 20: mod_base = OTHER; note = 2'-O-methyladenosine-3'-phosphate
  modified_base 21: mod_base = OTHER; note = 2'-O-methyluridine-3'-phosphate N-[tris(N-acetylgalactosamine-alkyl)-amidodecanoyl)]-4-hydr oxyprolinol Hyp-(GalNAc-alkyl)3
ctgggcgcggacatggaggat

SEQ ID NO: 329 - RNA, 21 nt, synthetic construct
  source 1..21: mol_type = other RNA; note = Description of Artificial Sequence: Synthetic oligonucleotide
  modified_base 1: mod_base = OTHER; note = 2'-O-methylcytidine-3'- phosphorothioate
  modified_base 2: mod_base = OTHER; note = 2'-O-methylguanosine-3'- phosphorothioate
  modified_base 3: mod_base = OTHER; note = 2'-O-methylcytidine-3'-phosphate
  modified_base 4: mod_base = OTHER; note = 2'-O-methylguanosine-3'-phosphate
  modified_base 5: mod_base = OTHER; note = 2'-O-methylguanosine-3'-phosphate
  modified_base 6: mod_base = OTHER; note = 2'-O-methyladenosine-3'-phosphate
  modified_base 7: mod_base = OTHER; note = 2'-fluorocytidine-3'-phosphate
  modified_base 8: mod_base = OTHER; note = 2'-O-methyladenosine-3'-phosphate
  modified_base 9: mod_base = OTHER; note = 2'-fluorouridine-3'-phosphate
  modified_base 10: mod_base = OTHER; note = 2'-fluoroguanosine-3'-phosphate
  modified_base 11: mod_base = OTHER; note = 2'-fluoroguanosine-3'-phosphate
  modified_base 12: mod_base = OTHER; note = 2'-O-methyladenosine-3'-phosphate
  modified_base 13: mod_base = OTHER; note = 2'-O-methylguanosine-3'-phosphate
  modified_base 14: mod_base = OTHER; note = 2'-O-methylguanosine-3'-phosphate
  modified_base 15: mod_base = OTHER; note = 2'-O-methyladenosine-3'-phosphate
  modified_base 16: mod_base = OTHER; note = 2'-O-methylcytidine-3'-phosphate
  modified_base 17: mod_base = OTHER; note = 2'-O-methylguanosine-3'-phosphate
  modified_base 18: mod_base = OTHER; note = 2'-O-methyluridine-3'-phosphate
  modified_base 19: mod_base = OTHER; note = 2'-O-methylguanosine-3'-phosphate
  modified_base 20: mod_base = OTHER; note = 2'-O-methylcytidine-3'-phosphate
  modified_base 21: mod_base = OTHER; note = 2'-O-methyluridine-3'-phosphate N-[tris(N-acetylgalactosamine-alkyl)-amidodecanoyl)]-4-hydr oxyprolinol Hyp-(GalNAc-alkyl)3
cgcggacatggaggacgtgct

SEQ ID NO: 330 - RNA, 21 nt, synthetic construct
  source 1..21: mol_type = other RNA; note = Description of Artificial Sequence: Synthetic oligonucleotide
  modified_base 1: mod_base = OTHER; note = 2'-O-methylguanosine-3'- phosphorothioate
  modified_base 2: mod_base = OTHER; note = 2'-O-methylcytidine-3'- phosphorothioate
  modified_base 3: mod_base = OTHER; note = 2'-O-methylguanosine-3'-phosphate
  modified_base 4: mod_base = OTHER; note = 2'-O-methylguanosine-3'-phosphate
  modified_base 5: mod_base = OTHER; note = 2'-O-methyladenosine-3'-phosphate
  modified_base 6: mod_base = OTHER; note = 2'-O-methylcytidine-3'-phosphate
  modified_base 7: mod_base = OTHER; note = 2'-fluoroadenosine-3'-phosphate
  modified_base 8: mod_base = OTHER; note = 2'-O-methyluridine-3'-phosphate
  modified_base 9: mod_base = OTHER; note = 2'-fluoroguanosine-3'-phosphate
  modified_base 10: mod_base = OTHER; note = 2'-fluoroguanosine-3'-phosphate
  modified_base 11: mod_base = OTHER; note = 2'-fluoroadenosine-3'-phosphate
  modified_base 12: mod_base = OTHER; note = 2'-O-methylguanosine-3'-phosphate
  modified_base 13: mod_base = OTHER; note = 2'-O-methylguanosine-3'-phosphate
  modified_base 14: mod_base = OTHER; note = 2'-O-methyladenosine-3'-phosphate
  modified_base 15: mod_base = OTHER; note = 2'-O-methylcytidine-3'-phosphate
  modified_base 16: mod_base = OTHER; note = 2'-O-methylguanosine-3'-phosphate
  modified_base 17: mod_base = OTHER; note = 2'-O-methyluridine-3'-phosphate
  modified_base 18: mod_base = OTHER; note = 2'-O-methylguanosine-3'-phosphate
  modified_base 19: mod_base = OTHER; note = 2'-O-methyluridine-3'-phosphate
  modified_base 20: mod_base = OTHER; note = 2'-O-methylguanosine-3'-phosphate
  modified_base 21: mod_base = OTHER; note = 2'-O-methyluridine-3'-phosphate N-[tris(N-acetylgalactosamine-alkyl)-amidodecanoyl)]-4-hydr oxyprolinol Hyp-(GalNAc-alkyl)3
gcggacatggaggacgtgtgt

SEQ ID NO: 331 - RNA, 21 nt, synthetic construct
  source 1..21: mol_type = other RNA; note = Description of Artificial Sequence: Synthetic oligonucleotide
  modified_base 1: mod_base = OTHER; note = 2'-O-methylguanosine-3'- phosphorothioate
  modified_base 2: mod_base = OTHER; note = 2'-O-methylcytidine-3'- phosphorothioate
  modified_base 3: mod_base = OTHER; note = 2'-O-methylguanosine-3'-phosphate
  modified_base 4: mod_base = OTHER; note = 2'-O-methylguanosine-3'-phosphate
  modified_base 5: mod_base = OTHER; note = 2'-O-methyladenosine-3'-phosphate
  modified_base 6: mod_base = OTHER; note = 2'-O-methylcytidine-3'-phosphate
  modified_base 7: mod_base = OTHER; note = 2'-fluoroadenosine-3'-phosphate
  modified_base 8: mod_base = OTHER; note = 2'-O-methyluridine-3'-phosphate
  modified_base 9: mod_base = OTHER; note = 2'-fluoroguanosine-3'-phosphate
  modified_base 10: mod_base = OTHER; note = 2'-fluoroguanosine-3'-phosphate
  modified_base 11: mod_base = OTHER; note = 2'-fluoroadenosine-3'-phosphate
  modified_base 12: mod_base = OTHER; note = 2'-O-methylguanosine-3'-phosphate
  modified_base 13: mod_base = OTHER; note = 2'-O-methylguanosine-3'-phosphate
  modified_base 14: mod_base = OTHER; note = 2'-O-methyladenosine-3'-phosphate
  modified_base 15: mod_base = OTHER; note = 2'-O-methylcytidine-3'-phosphate
  modified_base 16: mod_base = OTHER; note = 2'-O-methylguanosine-3'-phosphate
  modified_base 17: mod_base = OTHER; note = 2'-O-methyluridine-3'-phosphate
  modified_base 18: mod_base = OTHER; note = 2'-O-methylguanosine-3'-phosphate
  modified_base 19: mod_base = OTHER; note = 2'-O-methylcytidine-3'-phosphate
  modified_base 20: mod_base = OTHER; note = 2'-O-methylguanosine-3'-phosphate
  modified_base 21: mod_base = OTHER; note = 2'-O-methyluridine-3'-phosphate N-[tris(N-acetylgalactosamine-alkyl)-amidodecanoyl)]-4-hydr oxyprolinol Hyp-(GalNAc-alkyl)3
gcggacatggaggacgtgcgt

SEQ ID NO: 332 - RNA, 21 nt, synthetic construct
  source 1..21: mol_type = other RNA; note = Description of Artificial Sequence: Synthetic oligonucleotide
  modified_base 1: mod_base = OTHER; note = 2'-O-methylcytidine-3'- phosphorothioate
  modified_base 2: mod_base = OTHER; note = 2'-O-methylguanosine-3'- phosphorothioate
  modified_base 3: mod_base = OTHER; note = 2'-O-methylguanosine-3'-phosphate
  modified_base 4: mod_base = OTHER; note = 2'-O-methyladenosine-3'-phosphate
  modified_base 5: mod_base = OTHER; note = 2'-O-methylcytidine-3'-phosphate
  modified_base 6: mod_base = OTHER; note = 2'-O-methyladenosine-3'-phosphate
  modified_base 7: mod_base = OTHER; note = 2'-fluorouridine-3'-phosphate
  modified_base 8: mod_base = OTHER; note = 2'-O-methylguanosine-3'-phosphate
  modified_base 9: mod_base = OTHER; note = 2'-fluoroguanosine-3'-phosphate
  modified_base 10: mod_base = OTHER; note = 2'-fluoroadenosine-3'-phosphate
  modified_base 11: mod_base = OTHER; note = 2'-fluoroguanosine-3'-phosphate
  modified_base 12: mod_base = OTHER; note = 2'-O-methylguanosine-3'-phosphate
  modified_base 13: mod_base = OTHER; note = 2'-O-methyladenosine-3'-phosphate
  modified_base 14: mod_base = OTHER; note = 2'-O-methylcytidine-3'-phosphate
  modified_base 15: mod_base = OTHER; note = 2'-O-methylguanosine-3'-phosphate
  modified_base 16: mod_base = OTHER; note = 2'-O-methyluridine-3'-phosphate
  modified_base 17: mod_base = OTHER; note = 2'-O-methylguanosine-3'-phosphate
  modified_base 18: mod_base = OTHER; note = 2'-O-methylcytidine-3'-phosphate
  modified_base 19: mod_base = OTHER; note = 2'-O-methylguanosine-3'-phosphate
  modified_base 20: mod_base = OTHER; note = 2'-O-methylcytidine-3'-phosphate
  modified_base 21: mod_base = OTHER; note = 2'-O-methyluridine-3'-phosphate N-[tris(N-acetylgalactosamine-alkyl)-amidodecanoyl)]-4-hydr oxyprolinol Hyp-(GalNAc-alkyl)3
cggacatggaggacgtgcgct

SEQ ID NO: 333 - RNA, 21 nt, synthetic construct
  source 1..21: mol_type = other RNA; note = Description of Artificial Sequence: Synthetic oligonucleotide
  modified_base 1: mod_base = OTHER; note = 2'-O-methylguanosine-3'- phosphorothioate
  modified_base 2: mod_base = OTHER; note = 2'-O-methylguanosine-3'- phosphorothioate
  modified_base 3: mod_base = OTHER; note = 2'-O-methyladenosine-3'-phosphate
  modified_base 4: mod_base = OTHER; note = 2'-O-methylcytidine-3'-phosphate
  modified_base 5: mod_base = OTHER; note = 2'-O-methyladenosine-3'-phosphate
  modified_base 6: mod_base = OTHER; note = 2'-O-methyluridine-3'-phosphate
  modified_base 7: mod_base = OTHER; note = 2'-fluoroguanosine-3'-phosphate
  modified_base 8: mod_base = OTHER; note = 2'-O-methylguanosine-3'-phosphate
  modified_base 9: mod_base = OTHER; note = 2'-fluoroadenosine-3'-phosphate
  modified_base 10: mod_base = OTHER; note = 2'-fluoroguanosine-3'-phosphate
  modified_base 11: mod_base = OTHER; note = 2'-fluoroguanosine-3'-phosphate
  modified_base 12: mod_base = OTHER; note = 2'-O-methyladenosine-3'-phosphate
  modified_base 13: mod_base = OTHER; note = 2'-O-methylcytidine-3'-phosphate
  modified_base 14: mod_base = OTHER; note = 2'-O-methylguanosine-3'-phosphate
  modified_base 15: mod_base = OTHER; note = 2'-O-methyluridine-3'-phosphate
  modified_base 16: mod_base = OTHER; note = 2'-O-methylguanosine-3'-phosphate
  modified_base 17: mod_base = OTHER; note = 2'-O-methylcytidine-3'-phosphate
  modified_base 18: mod_base = OTHER; note = 2'-O-methylguanosine-3'-phosphate
  modified_base 19: mod_base = OTHER; note = 2'-O-methylcytidine-3'-phosphate
  modified_base 20: mod_base = OTHER; note = 2'-O-methylguanosine-3'-phosphate
  modified_base 21: mod_base = OTHER; note = 2'-O-methyluridine-3'-phosphate N-[tris(N-acetylgalactosamine-alkyl)-amidodecanoyl)]-4-hydr oxyprolinol Hyp-(GalNAc-alkyl)3
ggacatggaggacgtgcgcgt

SEQ ID NO: 334 - RNA, 21 nt, synthetic construct
  source 1..21: mol_type = other RNA; note = Description of Artificial Sequence: Synthetic oligonucleotide
  modified_base 1: mod_base = OTHER; note = 2'-O-methylguanosine-3'- phosphorothioate
  modified_base 2: mod_base = OTHER; note = 2'-O-methyladenosine-3'- phosphorothioate
  modified_base 3: mod_base = OTHER; note = 2'-O-methylcytidine-3'-phosphate
  modified_base 4: mod_base = OTHER; note = 2'-O-methyladenosine-3'-phosphate
  modified_base 5: mod_base = OTHER; note = 2'-O-methyluridine-3'-phosphate
  modified_base 6: mod_base = OTHER; note = 2'-O-methylguanosine-3'-phosphate
  modified_base 7: mod_base = OTHER; note = 2'-fluoroguanosine-3'-phosphate
  modified_base 8: mod_base = OTHER; note = 2'-O-methyladenosine-3'-phosphate
  modified_base 9: mod_base = OTHER; note = 2'-fluoroguanosine-3'-phosphate
  modified_base 10: mod_base = OTHER; note = 2'-fluoroguanosine-3'-phosphate
  modified_base 11: mod_base = OTHER; note = 2'-fluoroadenosine-3'-phosphate
  modified_base 12: mod_base = OTHER; note = 2'-O-methylcytidine-3'-phosphate
  modified_base 13: mod_base = OTHER; note = 2'-O-methylguanosine-3'-phosphate
  modified_base 14: mod_base = OTHER; note = 2'-O-methyluridine-3'-phosphate
  modified_base 15: mod_base = OTHER; note = 2'-O-methylguanosine-3'-phosphate
  modified_base 16: mod_base = OTHER; note = 2'-O-methylcytidine-3'-phosphate
  modified_base 17: mod_base = OTHER; note = 2'-O-methylguanosine-3'-phosphate
  modified_base 18: mod_base = OTHER; note = 2'-O-methylcytidine-3'-phosphate
  modified_base 19: mod_base = OTHER; note = 2'-O-methylguanosine-3'-phosphate
  modified_base 20: mod_base = OTHER; note = 2'-O-methylguanosine-3'-phosphate
  modified_base 21: mod_base = OTHER; note = 2'-O-methyluridine-3'-phosphate N-[tris(N-acetylgalactosamine-alkyl)-amidodecanoyl)]-4-hydr oxyprolinol Hyp-(GalNAc-alkyl)3
gacatggaggacgtgcgcggt

SEQ ID NO: 335 - RNA, 21 nt, synthetic construct
  source 1..21: mol_type = other RNA; note = Description of Artificial Sequence: Synthetic oligonucleotide
  modified_base 1: mod_base = OTHER; note = 2'-O-methyladenosine-3'- phosphorothioate
  modified_base 2: mod_base = OTHER; note = 2'-O-methylcytidine-3'- phosphorothioate
  modified_base 3: mod_base = OTHER; note = 2'-O-methyladenosine-3'-phosphate
  modified_base 4: mod_base = OTHER; note = 2'-O-methyluridine-3'-phosphate
  modified_base 5: mod_base = OTHER; note = 2'-O-methylguanosine-3'-phosphate
  modified_base 6: mod_base = OTHER; note = 2'-O-methylguanosine-3'-phosphate
  modified_base 7: mod_base = OTHER; note = 2'-fluoroadenosine-3'-phosphate
  modified_base 8: mod_base = OTHER; note = 2'-O-methylguanosine-3'-phosphate
  modified_base 9: mod_base = OTHER; note = 2'-fluoroguanosine-3'-phosphate
  modified_base 10: mod_base = OTHER; note = 2'-fluoroadenosine-3'-phosphate
  modified_base 11: mod_base = OTHER; note = 2'-fluorocytidine-3'-phosphate
  modified_base 12: mod_base = OTHER; note = 2'-O-methylguanosine-3'-phosphate
  modified_base 13: mod_base = OTHER; note = 2'-O-methyluridine-3'-phosphate
  modified_base 14: mod_base = OTHER; note = 2'-O-methylguanosine-3'-phosphate
  modified_base 15: mod_base = OTHER; note = 2'-O-methylcytidine-3'-phosphate
  modified_base 16: mod_base = OTHER; note = 2'-O-methylguanosine-3'-phosphate
  modified_base 17: mod_base = OTHER; note = 2'-O-methylcytidine-3'-phosphate
  modified_base 18: mod_base = OTHER; note = 2'-O-methylguanosine-3'-phosphate
  modified_base 19: mod_base = OTHER; note = 2'-O-methylguanosine-3'-phosphate
  modified_base 20: mod_base = OTHER; note = 2'-O-methylcytidine-3'-phosphate
  modified_base 21: mod_base = OTHER; note = 2'-O-methyluridine-3'-phosphate N-[tris(N-acetylgalactosamine-alkyl)-amidodecanoyl)]-4-hydr oxyprolinol Hyp-(GalNAc-alkyl)3
acatggaggacgtgcgcggct

SEQ ID NO: 336 - RNA, 21 nt, synthetic construct
  source 1..21: mol_type = other RNA; note = Description of Artificial Sequence: Synthetic oligonucleotide
  modified_base 1: mod_base = OTHER; note = 2'-O-methylcytidine-3'- phosphorothioate
  modified_base 2: mod_base = OTHER; note = 2'-O-methyladenosine-3'- phosphorothioate
  modified_base 3: mod_base = OTHER; note = 2'-O-methyluridine-3'-phosphate
  modified_base 4: mod_base = OTHER; note = 2'-O-methylguanosine-3'-phosphate
  modified_base 5: mod_base = OTHER; note = 2'-O-methylguanosine-3'-phosphate
  modified_base 6: mod_base = OTHER; note = 2'-O-methyladenosine-3'-phosphate
  modified_base 7: mod_base = OTHER; note = 2'-fluoroguanosine-3'-phosphate
  modified_base 8: mod_base = OTHER; note = 2'-O-methylguanosine-3'-phosphate
  modified_base 9: mod_base = OTHER; note = 2'-fluoroadenosine-3'-phosphate
  modified_base 10: mod_base = OTHER; note = 2'-fluorocytidine-3'-phosphate
  modified_base 11: mod_base = OTHER; note = 2'-fluoroguanosine-3'-phosphate
  modified_base 12: mod_base = OTHER; note = 2'-O-methyluridine-3'-phosphate
  modified_base 13: mod_base = OTHER; note = 2'-O-methylguanosine-3'-phosphate
  modified_base 14: mod_base = OTHER; note = 2'-O-methylcytidine-3'-phosphate
  modified_base 15: mod_base = OTHER; note = 2'-O-methylguanosine-3'-phosphate
  modified_base 16: mod_base = OTHER; note = 2'-O-methylcytidine-3'-phosphate
  modified_base 17: mod_base = OTHER; note = 2'-O-methylguanosine-3'-phosphate
  modified_base 18: mod_base = OTHER; note = 2'-O-methylguanosine-3'-phosphate
  modified_base 19: mod_base = OTHER; note = 2'-O-methylcytidine-3'-phosphate
  modified_base 20: mod_base = OTHER; note = 2'-O-methylcytidine-3'-phosphate
  modified_base 21: mod_base = OTHER; note = 2'-O-methyluridine-3'-phosphate N-[tris(N-acetylgalactosamine-alkyl)-amidodecanoyl)]-4-hydr oxyprolinol Hyp-(GalNAc-alkyl)3
catggaggacgtgcgcggcct

SEQ ID NO: 337 - RNA, 21 nt, synthetic construct
  source 1..21: mol_type = other RNA; note = Description of Artificial Sequence: Synthetic oligonucleotide
  modified_base 1: mod_base = OTHER; note = 2'-O-methyladenosine-3'- phosphorothioate
  modified_base 2: mod_base = OTHER; note = 2'-O-methyluridine-3'-phosphorothioate
  modified_base 3: mod_base = OTHER; note = 2'-O-methylguanosine-3'-phosphate
  modified_base 4: mod_base = OTHER; note = 2'-O-methylguanosine-3'-phosphate
  modified_base 5: mod_base = OTHER; note = 2'-O-methyladenosine-3'-phosphate
  modified_base 6: mod_base = OTHER; note = 2'-O-methylguanosine-3'-phosphate
  modified_base 7: mod_base = OTHER; note = 2'-fluoroguanosine-3'-phosphate
  modified_base 8: mod_base = OTHER; note = 2'-O-methyladenosine-3'-phosphate
  modified_base 9: mod_base = OTHER; note = 2'-fluorocytidine-3'-phosphate
  modified_base 10: mod_base = OTHER; note = 2'-fluoroguanosine-3'-phosphate
  modified_base 11: mod_base = OTHER; note = 2'-fluorouridine-3'-phosphate
  modified_base 12: mod_base = OTHER; note = 2'-O-methylguanosine-3'-phosphate
  modified_base 13: mod_base = OTHER; note = 2'-O-methylcytidine-3'-phosphate
  modified_base 14: mod_base = OTHER; note = 2'-O-methylguanosine-3'-phosphate
  modified_base 15: mod_base = OTHER; note = 2'-O-methylcytidine-3'-phosphate
  modified_base 16: mod_base = OTHER; note = 2'-O-methylguanosine-3'-phosphate
  modified_base 17: mod_base = OTHER; note = 2'-O-methylguanosine-3'-phosphate
  modified_base 18: mod_base = OTHER; note = 2'-O-methylcytidine-3'-phosphate
  modified_base 19: mod_base = OTHER; note = 2'-O-methylcytidine-3'-phosphate
  modified_base 20: mod_base = OTHER; note = 2'-O-methylguanosine-3'-phosphate
  modified_base 21: mod_base = OTHER; note = 2'-O-methyluridine-3'-phosphate N-[tris(N-acetylgalactosamine-alkyl)-amidodecanoyl)]-4-hydr oxyprolinol Hyp-(GalNAc-alkyl)3
atggaggacgtgcgcggccgt

SEQ ID NO: 338 - RNA, 21 nt, synthetic construct
  source 1..21: mol_type = other RNA; note = Description of Artificial Sequence: Synthetic oligonucleotide
  modified_base 1: mod_base = OTHER; note = 2'-O-methyluridine-3'-phosphorothioate
  modified_base 2: mod_base = OTHER; note = 2'-O-methylguanosine-3'- phosphorothioate
  modified_base 3: mod_base = OTHER; note = 2'-O-methylguanosine-3'-phosphate
  modified_base 4: mod_base = OTHER; note = 2'-O-methyladenosine-3'-phosphate
  modified_base 5: mod_base = OTHER; note = 2'-O-methylguanosine-3'-phosphate
  modified_base 6: mod_base = OTHER; note = 2'-O-methylguanosine-3'-phosphate
  modified_base 7: mod_base = OTHER; note = 2'-fluoroadenosine-3'-phosphate
  modified_base 8: mod_base = OTHER; note = 2'-O-methylcytidine-3'-phosphate
  modified_base 9: mod_base = OTHER; note = 2'-fluoroguanosine-3'-phosphate
  modified_base 10: mod_base = OTHER; note = 2'-fluorouridine-3'-phosphate
  modified_base 11: mod_base = OTHER; note = 2'-fluoroguanosine-3'-phosphate
  modified_base 12: mod_base = OTHER; note = 2'-O-methylcytidine-3'-phosphate
  modified_base 13: mod_base = OTHER; note = 2'-O-methylguanosine-3'-phosphate
  modified_base 14: mod_base = OTHER; note = 2'-O-methylcytidine-3'-phosphate
  modified_base 15: mod_base = OTHER; note = 2'-O-methylguanosine-3'-phosphate
  modified_base 16: mod_base = OTHER; note = 2'-O-methylguanosine-3'-phosphate
  modified_base 17: mod_base = OTHER; note = 2'-O-methylcytidine-3'-phosphate
  modified_base 18: mod_base = OTHER; note = 2'-O-methylcytidine-3'-phosphate
  modified_base 19: mod_base = OTHER; note = 2'-O-methylguanosine-3'-phosphate
  modified_base 20: mod_base = OTHER; note = 2'-O-methylcytidine-3'-phosphate
  modified_base 21: mod_base = OTHER; note = 2'-O-methyluridine-3'-phosphate N-[tris(N-acetylgalactosamine-alkyl)-amidodecanoyl)]-4-hydr oxyprolinol Hyp-(GalNAc-alkyl)3
tggaggacgtgcgcggccgct

SEQ ID NO: 339 - RNA, 21 nt, synthetic construct
  source 1..21: mol_type = other RNA; note = Description of Artificial Sequence: Synthetic oligonucleotide
  modified_base 1: mod_base = OTHER; note = 2'-O-methylguanosine-3'- phosphorothioate
  modified_base 2: mod_base = OTHER; note = 2'-O-methylguanosine-3'- phosphorothioate
  modified_base 3: mod_base = OTHER; note = 2'-O-methyladenosine-3'-phosphate
  modified_base 4: mod_base = OTHER; note = 2'-O-methylguanosine-3'-phosphate
  modified_base 5: mod_base = OTHER; note = 2'-O-methylguanosine-3'-phosphate
  modified_base 6: mod_base = OTHER; note = 2'-O-methyladenosine-3'-phosphate
  modified_base 7: mod_base = OTHER; note = 2'-fluorocytidine-3'-phosphate
  modified_base 8: mod_base = OTHER; note = 2'-O-methylguanosine-3'-phosphate
  modified_base 9: mod_base = OTHER; note = 2'-fluorouridine-3'-phosphate
  modified_base 10: mod_base = OTHER; note = 2'-fluoroguanosine-3'-phosphate
  modified_base 11: mod_base = OTHER; note = 2'-fluorocytidine-3'-phosphate
  modified_base 12: mod_base = OTHER; note = 2'-O-methylguanosine-3'-phosphate
  modified_base 13: mod_base = OTHER; note = 2'-O-methylcytidine-3'-phosphate
  modified_base 14: mod_base = OTHER; note = 2'-O-methylguanosine-3'-phosphate
  modified_base 15: mod_base = OTHER; note = 2'-O-methylguanosine-3'-phosphate
  modified_base 16: mod_base = OTHER; note = 2'-O-methylcytidine-3'-phosphate
  modified_base 17: mod_base = OTHER; note = 2'-O-methylcytidine-3'-phosphate
  modified_base 18: mod_base = OTHER; note = 2'-O-methylguanosine-3'-phosphate
  modified_base 19: mod_base = OTHER; note = 2'-O-methylcytidine-3'-phosphate
  modified_base 20: mod_base = OTHER; note = 2'-O-methylcytidine-3'-phosphate
  modified_base 21: mod_base = OTHER; note = 2'-O-methyluridine-3'-phosphate N-[tris(N-acetylgalactosamine-alkyl)-amidodecanoyl)]-4-hydr oxyprolinol Hyp-(GalNAc-alkyl)3
ggaggacgtgcgcggccgcct

SEQ ID NO: 340 - RNA, 21 nt, synthetic construct
  source 1..21: mol_type = other RNA; note = Description of Artificial Sequence: Synthetic oligonucleotide
  modified_base 1: mod_base = OTHER; note = 2'-O-methylguanosine-3'- phosphorothioate
  modified_base 2: mod_base = OTHER; note = 2'-O-methyladenosine-3'- phosphorothioate
  modified_base 3: mod_base = OTHER; note = 2'-O-methylguanosine-3'-phosphate
  modified_base 4: mod_base = OTHER; note = 2'-O-methylguanosine-3'-phosphate
  modified_base 5: mod_base = OTHER; note = 2'-O-methyladenosine-3'-phosphate
  modified_base 6: mod_base = OTHER; note = 2'-O-methylcytidine-3'-phosphate
  modified_base 7: mod_base = OTHER; note = 2'-fluoroguanosine-3'-phosphate
  modified_base 8: mod_base = OTHER; note = 2'-O-methyluridine-3'-phosphate
  modified_base 9: mod_base = OTHER; note = 2'-fluoroguanosine-3'-phosphate
  modified_base 10: mod_base = OTHER; note = 2'-fluorocytidine-3'-phosphate
  modified_base 11: mod_base = OTHER; note = 2'-fluoroguanosine-3'-phosphate
  modified_base 12: mod_base = OTHER; note = 2'-O-methylcytidine-3'-phosphate
  modified_base 13: mod_base = OTHER; note = 2'-O-methylguanosine-3'-phosphate
  modified_base 14: mod_base = OTHER; note = 2'-O-methylguanosine-3'-phosphate
  modified_base 15: mod_base = OTHER; note = 2'-O-methylcytidine-3'-phosphate
  modified_base 16: mod_base = OTHER; note = 2'-O-methylcytidine-3'-phosphate
  modified_base 17: mod_base = OTHER; note = 2'-O-methylguanosine-3'-phosphate
  modified_base 18: mod_base = OTHER; note = 2'-O-methylcytidine-3'-phosphate
  modified_base 19: mod_base = OTHER; note = 2'-O-methylcytidine-3'-phosphate
  modified_base 20: mod_base = OTHER; note = 2'-O-methyluridine-3'-phosphate
  modified_base 21: mod_base = OTHER; note = 2'-O-methyluridine-3'-phosphate N-[tris(N-acetylgalactosamine-alkyl)-amidodecanoyl)]-4-hydr oxyprolinol Hyp-(GalNAc-alkyl)3
gaggacgtgcgcggccgcctt

SEQ ID NO: 341 - RNA, 21 nt, synthetic construct
  source 1..21: mol_type = other RNA; note = Description of Artificial Sequence: Synthetic oligonucleotide
  modified_base 1: mod_base = OTHER; note = 2'-O-methyladenosine-3'- phosphorothioate
  modified_base 2: mod_base = OTHER; note = 2'-O-methylguanosine-3'- phosphorothioate
  modified_base 3: mod_base = OTHER; note = 2'-O-methylguanosine-3'-phosphate
  modified_base 4: mod_base = OTHER; note = 2'-O-methyladenosine-3'-phosphate
  modified_base 5: mod_base = OTHER; note = 2'-O-methylcytidine-3'-phosphate
  modified_base 6: mod_base = OTHER; note = 2'-O-methylguanosine-3'-phosphate
  modified_base 7: mod_base = OTHER; note = 2'-fluorouridine-3'-phosphate
  modified_base 8: mod_base = OTHER; note = 2'-O-methylguanosine-3'-phosphate
  modified_base 9: mod_base = OTHER; note = 2'-fluorocytidine-3'-phosphate
  modified_base 10: mod_base = OTHER; note = 2'-fluoroguanosine-3'-phosphate
  modified_base 11: mod_base = OTHER; note = 2'-fluorocytidine-3'-phosphate
  modified_base 12: mod_base = OTHER; note = 2'-O-methylguanosine-3'-phosphate
  modified_base 13: mod_base = OTHER; note = 2'-O-methylguanosine-3'-phosphate
  modified_base 14: mod_base = OTHER; note = 2'-O-methylcytidine-3'-phosphate
  modified_base 15: mod_base = OTHER; note = 2'-O-methylcytidine-3'-phosphate
  modified_base 16: mod_base = OTHER; note = 2'-O-methylguanosine-3'-phosphate
  modified_base 17: mod_base = OTHER; note = 2'-O-methylcytidine-3'-phosphate
  modified_base 18: mod_base = OTHER; note = 2'-O-methylcytidine-3'-phosphate
  modified_base 19: mod_base = OTHER; note = 2'-O-methyluridine-3'-phosphate
  modified_base 20: mod_base = OTHER; note = 2'-O-methylguanosine-3'-phosphate
  modified_base 21: mod_base = OTHER; note = 2'-O-methyluridine-3'-phosphate N-[tris(N-acetylgalactosamine-alkyl)-amidodecanoyl)]-4-hydr oxyprolinol Hyp-(GalNAc-alkyl)3
aggacgtgcgcggccgcctgt

SEQ ID NO: 342 - RNA, 21 nt, synthetic construct
  source 1..21: mol_type = other RNA; note = Description of Artificial Sequence: Synthetic oligonucleotide
  modified_base 1: mod_base = OTHER; note = 2'-O-methylguanosine-3'- phosphorothioate
  modified_base 2: mod_base = OTHER; note = 2'-O-methylguanosine-3'- phosphorothioate
  modified_base 3: mod_base = OTHER; note = 2'-O-methyladenosine-3'-phosphate
  modified_base 4: mod_base = OTHER; note = 2'-O-methylcytidine-3'-phosphate
  modified_base 5: mod_base = OTHER; note = 2'-O-methylguanosine-3'-phosphate
  modified_base 6: mod_base = OTHER; note = 2'-O-methyluridine-3'-phosphate
  modified_base 7: mod_base = OTHER; note = 2'-fluoroguanosine-3'-phosphate
  modified_base 8: mod_base = OTHER; note = 2'-O-methylcytidine-3'-phosphate
  modified_base 9: mod_base = OTHER; note = 2'-fluoroguanosine-3'-phosphate
  modified_base 10: mod_base = OTHER; note = 2'-fluorocytidine-3'-phosphate
  modified_base 11: mod_base = OTHER; note = 2'-fluoroguanosine-3'-phosphate
  modified_base 12: mod_base = OTHER; note = 2'-O-methylguanosine-3'-phosphate
  modified_base 13: mod_base = OTHER; note = 2'-O-methylcytidine-3'-phosphate
  modified_base 14: mod_base = OTHER; note = 2'-O-methylcytidine-3'-phosphate
  modified_base 15: mod_base = OTHER; note = 2'-O-methylguanosine-3'-phosphate
  modified_base 16: mod_base = OTHER; note = 2'-O-methylcytidine-3'-phosphate
  modified_base 17: mod_base = OTHER; note = 2'-O-methylcytidine-3'-phosphate
  modified_base 18: mod_base = OTHER; note = 2'-O-methyluridine-3'-phosphate
  modified_base 19: mod_base = OTHER; note = 2'-O-methylguanosine-3'-phosphate
  modified_base 20: mod_base = OTHER; note = 2'-O-methylguanosine-3'-phosphate
  modified_base 21: mod_base = OTHER; note = 2'-O-methyluridine-3'-phosphate N-[tris(N-acetylgalactosamine-alkyl)-amidodecanoyl)]-4-hydr oxyprolinol Hyp-(GalNAc-alkyl)3
ggacgtgcgcggccgcctggt

SEQ ID NO: 343 - RNA, 21 nt, synthetic construct
  source 1..21: mol_type = other RNA; note = Description of Artificial Sequence: Synthetic oligonucleotide
  modified_base 1: mod_base = OTHER; note = 2'-O-methylguanosine-3'- phosphorothioate
  modified_base 2: mod_base = OTHER; note = 2'-O-methyladenosine-3'- phosphorothioate
  modified_base 3: mod_base = OTHER; note = 2'-O-methylcytidine-3'-phosphate
  modified_base 4: mod_base = OTHER; note = 2'-O-methylguanosine-3'-phosphate
  modified_base 5: mod_base = OTHER; note = 2'-O-methyluridine-3'-phosphate
  modified_base 6: mod_base = OTHER; note = 2'-O-methylguanosine-3'-phosphate
  modified_base 7: mod_base = OTHER; note = 2'-fluorocytidine-3'-phosphate
  modified_base 8: mod_base = OTHER; note = 2'-O-methylguanosine-3'-phosphate
  modified_base 9: mod_base = OTHER; note = 2'-fluorocytidine-3'-phosphate
  modified_base 10: mod_base = OTHER; note = 2'-fluoroguanosine-3'-phosphate
  modified_base 11: mod_base = OTHER; note = 2'-fluoroguanosine-3'-phosphate
  modified_base 12: mod_base = OTHER; note = 2'-O-methylcytidine-3'-phosphate
  modified_base 13: mod_base = OTHER; note = 2'-O-methylcytidine-3'-phosphate
  modified_base 14: mod_base = OTHER; note = 2'-O-methylguanosine-3'-phosphate
  modified_base 15: mod_base = OTHER; note = 2'-O-methylcytidine-3'-phosphate
  modified_base 16: mod_base = OTHER; note = 2'-O-methylcytidine-3'-phosphate
  modified_base 17: mod_base = OTHER; note = 2'-O-methyluridine-3'-phosphate
  modified_base 18: mod_base = OTHER; note = 2'-O-methylguanosine-3'-phosphate
  modified_base 19: mod_base = OTHER; note = 2'-O-methylguanosine-3'-phosphate
  modified_base 20: mod_base = OTHER; note = 2'-O-methyluridine-3'-phosphate
  modified_base 21: mod_base = OTHER; note = 2'-O-methyluridine-3'-phosphate N-[tris(N-acetylgalactosamine-alkyl)-amidodecanoyl)]-4-hydr oxyprolinol Hyp-(GalNAc-alkyl)3
gacgtgcgcggccgcctggtt

SEQ ID NO: 344 - RNA, 21 nt, synthetic construct
  source 1..21: mol_type = other RNA; note = Description of Artificial Sequence: Synthetic oligonucleotide
  modified_base 1: mod_base = OTHER; note = 2'-O-methyladenosine-3'- phosphorothioate
  modified_base 2: mod_base = OTHER; note = 2'-O-methylcytidine-3'- phosphorothioate
  modified_base 3: mod_base = OTHER; note = 2'-O-methylguanosine-3'-phosphate
  modified_base 4: mod_base = OTHER; note = 2'-O-methyluridine-3'-phosphate
  modified_base 5: mod_base = OTHER; note = 2'-O-methylguanosine-3'-phosphate
  modified_base 6: mod_base = OTHER; note = 2'-O-methylcytidine-3'-phosphate
  modified_base 7: mod_base = OTHER; note = 2'-fluoroguanosine-3'-phosphate
  modified_base 8: mod_base = OTHER; note = 2'-O-methylcytidine-3'-phosphate
  modified_base 9: mod_base = OTHER; note = 2'-fluoroguanosine-3'-phosphate
  modified_base 10: mod_base = OTHER; note = 2'-fluoroguanosine-3'-phosphate
  modified_base 11: mod_base = OTHER; note = 2'-fluorocytidine-3'-phosphate
  modified_base 12: mod_base = OTHER; note = 2'-O-methylcytidine-3'-phosphate
  modified_base 13: mod_base = OTHER; note = 2'-O-methylguanosine-3'-phosphate
  modified_base 14: mod_base = OTHER; note = 2'-O-methylcytidine-3'-phosphate
  modified_base 15: mod_base = OTHER; note = 2'-O-methylcytidine-3'-phosphate
  modified_base 16: mod_base = OTHER; note = 2'-O-methyluridine-3'-phosphate
  modified_base 17: mod_base = OTHER; note = 2'-O-methylguanosine-3'-phosphate
  modified_base 18: mod_base = OTHER; note = 2'-O-methylguanosine-3'-phosphate
  modified_base 19: mod_base = OTHER; note = 2'-O-methyluridine-3'-phosphate
  modified_base 20: mod_base = OTHER; note = 2'-O-methylguanosine-3'-phosphate
  modified_base 21: mod_base = OTHER; note = 2'-O-methyluridine-3'-phosphate N-[tris(N-acetylgalactosamine-alkyl)-amidodecanoyl)]-4-hydr oxyprolinol Hyp-(GalNAc-alkyl)3
acgtgcgcggccgcctggtgt

SEQ ID NO: 345 - RNA, 21 nt, synthetic construct
  source 1..21: mol_type = other RNA; note = Description of Artificial Sequence: Synthetic oligonucleotide
  modified_base 1: mod_base = OTHER; note = 2'-O-methylcytidine-3'- phosphorothioate
  modified_base 2: mod_base = OTHER; note = 2'-O-methylguanosine-3'- phosphorothioate
  modified_base 3: mod_base = OTHER; note = 2'-O-methyluridine-3'-phosphate
  modified_base 4: mod_base = OTHER; note = 2'-O-methylguanosine-3'-phosphate
  modified_base 5: mod_base = OTHER; note = 2'-O-methylcytidine-3'-phosphate
  modified_base 6: mod_base = OTHER; note = 2'-O-methylguanosine-3'-phosphate
  modified_base 7: mod_base = OTHER; note = 2'-fluorocytidine-3'-phosphate
  modified_base 8: mod_base = OTHER; note = 2'-O-methylguanosine-3'-phosphate
  modified_base 9: mod_base = OTHER; note = 2'-fluoroguanosine-3'-phosphate
  modified_base 10: mod_base = OTHER; note = 2'-fluorocytidine-3'-phosphate
  modified_base 11: mod_base = OTHER; note = 2'-fluorocytidine-3'-phosphate
  modified_base 12: mod_base = OTHER; note = 2'-O-methylguanosine-3'-phosphate
  modified_base 13: mod_base = OTHER; note = 2'-O-methylcytidine-3'-phosphate
  modified_base 14: mod_base = OTHER; note = 2'-O-methylcytidine-3'-phosphate
  modified_base 15: mod_base = OTHER; note = 2'-O-methyluridine-3'-phosphate
  modified_base 16: mod_base = OTHER; note = 2'-O-methylguanosine-3'-phosphate
  modified_base 17: mod_base = OTHER; note = 2'-O-methylguanosine-3'-phosphate
  modified_base 18: mod_base = OTHER; note = 2'-O-methyluridine-3'-phosphate
  modified_base 19: mod_base = OTHER; note = 2'-O-methylguanosine-3'-phosphate
  modified_base 20: mod_base = OTHER; note = 2'-O-methylcytidine-3'-phosphate
  modified_base 21: mod_base = OTHER; note = 2'-O-methyluridine-3'-phosphate N-[tris(N-acetylgalactosamine-alkyl)-amidodecanoyl)]-4-hydr oxyprolinol Hyp-(GalNAc-alkyl)3
cgtgcgcggccgcctggtgct

SEQ ID NO: 346 - RNA, 21 nt, synthetic construct
  source 1..21: mol_type = other RNA; note = Description of Artificial Sequence: Synthetic oligonucleotide
  modified_base 1: mod_base = OTHER; note = 2'-O-methylguanosine-3'- phosphorothioate
  modified_base 2: mod_base = OTHER; note = 2'-O-methyluridine-3'-phosphorothioate
  modified_base 3: mod_base = OTHER; note = 2'-O-methylguanosine-3'-phosphate
  modified_base 4: mod_base = OTHER; note = 2'-O-methylcytidine-3'-phosphate
  modified_base 5: mod_base = OTHER; note = 2'-O-methylguanosine-3'-phosphate
  modified_base 6: mod_base = OTHER; note = 2'-O-methylcytidine-3'-phosphate
  modified_base 7: mod_base = OTHER; note = 2'-fluoroguanosine-3'-phosphate
  modified_base 8: mod_base = OTHER; note = 2'-O-methylguanosine-3'-phosphate
  modified_base 9: mod_base = OTHER; note = 2'-fluorocytidine-3'-phosphate
  modified_base 10: mod_base = OTHER; note = 2'-fluorocytidine-3'-phosphate
  modified_base 11: mod_base = OTHER; note = 2'-fluoroguanosine-3'-phosphate
  modified_base 12: mod_base = OTHER; note = 2'-O-methylcytidine-3'-phosphate
  modified_base 13: mod_base = OTHER; note = 2'-O-methylcytidine-3'-phosphate
  modified_base 14: mod_base = OTHER; note = 2'-O-methyluridine-3'-phosphate
  modified_base 15: mod_base = OTHER; note = 2'-O-methylguanosine-3'-phosphate
  modified_base 16: mod_base = OTHER; note = 2'-O-methylguanosine-3'-phosphate
  modified_base 17: mod_base = OTHER; note = 2'-O-methyluridine-3'-phosphate
  modified_base 18: mod_base = OTHER; note = 2'-O-methylguanosine-3'-phosphate
  modified_base 19: mod_base = OTHER; note = 2'-O-methylcytidine-3'-phosphate
  modified_base 20: mod_base = OTHER; note = 2'-O-methyladenosine-3'-phosphate
  modified_base 21: mod_base = OTHER; note = 2'-O-methyluridine-3'-phosphate N-[tris(N-acetylgalactosamine-alkyl)-amidodecanoyl)]-4-hydr oxyprolinol Hyp-(GalNAc-alkyl)3
gtgcgcggccgcctggtgcat

SEQ ID NO: 347 - RNA, 21 nt, synthetic construct
  source 1..21: mol_type = other RNA; note = Description of Artificial Sequence: Synthetic oligonucleotide
  modified_base 1: mod_base = OTHER; note = 2'-O-methylguanosine-3'- phosphorothioate
  modified_base 2: mod_base = OTHER; note = 2'-O-methylcytidine-3'- phosphorothioate
  modified_base 3: mod_base = OTHER; note = 2'-O-methylguanosine-3'-phosphate
  modified_base 4: mod_base = OTHER; note = 2'-O-methylguanosine-3'-phosphate
  modified_base 5: mod_base = OTHER; note = 2'-O-methylcytidine-3'-phosphate
  modified_base 6: mod_base = OTHER; note = 2'-O-methylcytidine-3'-phosphate
  modified_base 7: mod_base = OTHER; note = 2'-fluoroguanosine-3'-phosphate
  modified_base 8: mod_base = OTHER; note = 2'-O-methylcytidine-3'-phosphate
  modified_base 9: mod_base = OTHER; note = 2'-fluorocytidine-3'-phosphate
  modified_base 10: mod_base = OTHER; note = 2'-fluorouridine-3'-phosphate
  modified_base 11: mod_base = OTHER; note = 2'-fluoroguanosine-3'-phosphate
  modified_base 12: mod_base = OTHER; note = 2'-O-methylguanosine-3'-phosphate
  modified_base 13: mod_base = OTHER; note = 2'-O-methyluridine-3'-phosphate
  modified_base 14: mod_base = OTHER; note = 2'-O-methylguanosine-3'-phosphate
  modified_base 15: mod_base = OTHER; note = 2'-O-methylcytidine-3'-phosphate
  modified_base 16: mod_base = OTHER; note = 2'-O-methyladenosine-3'-phosphate
  modified_base 17: mod_base = OTHER; note = 2'-O-methylguanosine-3'-phosphate
  modified_base 18: mod_base = OTHER; note = 2'-O-methyluridine-3'-phosphate
  modified_base 19: mod_base = OTHER; note = 2'-O-methyladenosine-3'-phosphate
  modified_base 20: mod_base = OTHER; note = 2'-O-methylcytidine-3'-phosphate
  modified_base 21: mod_base = OTHER; note = 2'-O-methyluridine-3'-phosphate N-[tris(N-acetylgalactosamine-alkyl)-amidodecanoyl)]-4-hydr oxyprolinol Hyp-(GalNAc-alkyl)3
gcggccgcctggtgcagtact

SEQ ID NO: 348 - RNA, 21 nt, synthetic construct
  source 1..21: mol_type = other RNA; note = Description of Artificial Sequence: Synthetic oligonucleotide
  modified_base 1: mod_base = OTHER; note = 2'-O-methylcytidine-3'- phosphorothioate
  modified_base 2: mod_base = OTHER; note = 2'-O-methylguanosine-3'- phosphorothioate
  modified_base 3: mod_base = OTHER; note = 2'-O-methylcytidine-3'-phosphate
  modified_base 4: mod_base = OTHER; note = 2'-O-methylcytidine-3'-phosphate
  modified_base 5: mod_base = OTHER; note = 2'-O-methyluridine-3'-phosphate
  modified_base 6: mod_base = OTHER; note = 2'-O-methylguanosine-3'-phosphate
  modified_base 7: mod_base = OTHER; note = 2'-fluoroguanosine-3'-phosphate
  modified_base 8: mod_base = OTHER; note = 2'-O-methyluridine-3'-phosphate
  modified_base 9: mod_base = OTHER; note = 2'-fluoroguanosine-3'-phosphate
  modified_base 10: mod_base = OTHER; note = 2'-fluorocytidine-3'-phosphate
  modified_base 11: mod_base = OTHER; note = 2'-fluoroadenosine-3'-phosphate
  modified_base 12: mod_base = OTHER; note = 2'-O-methylguanosine-3'-phosphate
  modified_base 13: mod_base = OTHER; note = 2'-O-methyluridine-3'-phosphate
  modified_base 14: mod_base = OTHER; note = 2'-O-methyladenosine-3'-phosphate
  modified_base 15: mod_base = OTHER; note = 2'-O-methylcytidine-3'-phosphate
  modified_base 16: mod_base = OTHER; note = 2'-O-methylcytidine-3'-phosphate
  modified_base 17: mod_base = OTHER; note = 2'-O-methylguanosine-3'-phosphate
  modified_base 18: mod_base = OTHER; note = 2'-O-methylcytidine-3'-phosphate
  modified_base 19: mod_base = OTHER; note = 2'-O-methylguanosine-3'-phosphate
  modified_base 20: mod_base = OTHER; note = 2'-O-methylguanosine-3'-phosphate
  modified_base 21: mod_base = OTHER; note = 2'-O-methyluridine-3'-phosphate N-[tris(N-acetylgalactosamine-alkyl)-amidodecanoyl)]-4-hydr oxyprolinol Hyp-(GalNAc-alkyl)3
cgcctggtgcagtaccgcggt

SEQ ID NO: 349 - RNA, 21 nt, synthetic construct
  source 1..21: mol_type = other RNA; note = Description of Artificial Sequence: Synthetic oligonucleotide
  modified_base 1: mod_base = OTHER; note = 2'-O-methylguanosine-3'- phosphorothioate
  modified_base 2: mod_base = OTHER; note = 2'-O-methyladenosine-3'- phosphorothioate
  modified_base 3: mod_base = OTHER; note = 2'-O-methylguanosine-3'-phosphate
  modified_base 4: mod_base = OTHER; note = 2'-O-methylguanosine-3'-phosphate
  modified_base 5: mod_base = OTHER; note = 2'-O-methyluridine-3'-phosphate
  modified_base 6: mod_base = OTHER; note = 2'-O-methylguanosine-3'-phosphate
  modified_base 7: mod_base = OTHER; note = 2'-fluorocytidine-3'-phosphate
  modified_base 8: mod_base = OTHER; note = 2'-O-methyladenosine-3'-phosphate
  modified_base 9: mod_base = OTHER; note = 2'-fluoroguanosine-3'-phosphate
  modified_base 10: mod_base = OTHER; note = 2'-fluoroguanosine-3'-phosphate
  modified_base 11: mod_base = OTHER; note = 2'-fluorocytidine-3'-phosphate
  modified_base 12: mod_base = OTHER; note = 2'-O-methylcytidine-3'-phosphate
  modified_base 13: mod_base = OTHER; note = 2'-O-methyladenosine-3'-phosphate
  modified_base 14: mod_base = OTHER; note = 2'-O-methyluridine-3'-phosphate
  modified_base 15: mod_base = OTHER; note = 2'-O-methylguanosine-3'-phosphate
  modified_base 16: mod_base = OTHER; note = 2'-O-methylcytidine-3'-phosphate
  modified_base 17: mod_base = OTHER; note = 2'-O-methyluridine-3'-phosphate
  modified_base 18: mod_base = OTHER; note = 2'-O-methylcytidine-3'-phosphate
  modified_base 19: mod_base = OTHER; note = 2'-O-methylguanosine-3'-phosphate
  modified_base 20: mod_base = OTHER; note = 2'-O-methylguanosine-3'-phosphate
  modified_base 21: mod_base = OTHER; note = 2'-O-methyluridine-3'-phosphate N-[tris(N-acetylgalactosamine-alkyl)-amidodecanoyl)]-4-hydr oxyprolinol Hyp-(GalNAc-alkyl)3
gaggtgcaggccatgctcggt

SEQ ID NO: 350 - RNA, 21 nt, synthetic construct
  source 1..21: mol_type = other RNA; note = Description of Artificial Sequence: Synthetic oligonucleotide
  modified_base 1: mod_base = OTHER; note = 2'-O-methylguanosine-3'- phosphorothioate
  modified_base 2: mod_base = OTHER; note = 2'-O-methylcytidine-3'- phosphorothioate
  modified_base 3: mod_base = OTHER; note = 2'-O-methylcytidine-3'-phosphate
  modified_base 4: mod_base = OTHER; note = 2'-O-methyladenosine-3'-phosphate
  modified_base 5: mod_base = OTHER; note = 2'-O-methyluridine-3'-phosphate
  modified_base 6: mod_base = OTHER; note = 2'-O-methylguanosine-3'-phosphate
  modified_base 7: mod_base = OTHER; note = 2'-fluorocytidine-3'-phosphate
  modified_base 8: mod_base = OTHER; note = 2'-O-methyluridine-3'-phosphate
  modified_base 9: mod_base = OTHER; note = 2'-fluorocytidine-3'-phosphate
  modified_base 10: mod_base = OTHER; note = 2'-fluoroguanosine-3'-phosphate
  modified_base 11: mod_base = OTHER; note = 2'-fluoroguanosine-3'-phosphate
  modified_base 12: mod_base = OTHER; note = 2'-O-methylcytidine-3'-phosphate
  modified_base 13: mod_base = OTHER; note = 2'-O-methylcytidine-3'-phosphate
  modified_base 14: mod_base = OTHER; note = 2'-O-methyladenosine-3'-phosphate
  modified_base 15: mod_base = OTHER; note = 2'-O-methylguanosine-3'-phosphate
  modified_base 16: mod_base = OTHER; note = 2'-O-methyladenosine-3'-phosphate
  modified_base 17: mod_base = OTHER; note = 2'-O-methylguanosine-3'-phosphate
  modified_base 18: mod_base = OTHER; note = 2'-O-methylcytidine-3'-phosphate
  modified_base 19: mod_base = OTHER; note = 2'-O-methyladenosine-3'-phosphate
  modified_base 20: mod_base = OTHER; note = 2'-O-methylcytidine-3'-phosphate
  modified_base 21: mod_base = OTHER; note = 2'-O-methyluridine-3'-phosphate N-[tris(N-acetylgalactosamine-alkyl)-amidodecanoyl)]-4-hydr oxyprolinol Hyp-(GalNAc-alkyl)3
gccatgctcggccagagcact

SEQ ID NO: 351 - RNA, 21 nt, synthetic construct
  source 1..21: mol_type = other RNA; note = Description of Artificial Sequence: Synthetic oligonucleotide
  modified_base 1: mod_base = OTHER; note = 2'-O-methylguanosine-3'- phosphorothioate
  modified_base 2: mod_base = OTHER; note = 2'-O-methylguanosine-3'- phosphorothioate
  modified_base 3: mod_base = OTHER; note = 2'-O-methylcytidine-3'-phosphate
  modified_base 4: mod_base = OTHER; note = 2'-O-methylcytidine-3'-phosphate
  modified_base 5: mod_base = OTHER; note = 2'-O-methyladenosine-3'-phosphate
  modified_base 6: mod_base = OTHER; note = 2'-O-methylguanosine-3'-phosphate
  modified_base 7: mod_base = OTHER; note = 2'-fluoroadenosine-3'-phosphate
  modified_base 8: mod_base = OTHER; note = 2'-O-methylguanosine-3'-phosphate
  modified_base 9: mod_base = OTHER; note = 2'-fluorocytidine-3'-phosphate
  modified_base 10: mod_base = OTHER; note = 2'-fluoroadenosine-3'-phosphate
  modified_base 11: mod_base = OTHER; note = 2'-fluorocytidine-3'-phosphate
  modified_base 12: mod_base = OTHER; note = 2'-O-methylcytidine-3'-phosphate
  modified_base 13: mod_base = OTHER; note = 2'-O-methylguanosine-3'-phosphate
  modified_base 14: mod_base = OTHER; note = 2'-O-methyladenosine-3'-phosphate
  modified_base 15: mod_base = OTHER; note = 2'-O-methylguanosine-3'-phosphate
  modified_base 16: mod_base = OTHER; note = 2'-O-methylguanosine-3'-phosphate
  modified_base 17: mod_base = OTHER; note = 2'-O-methyladenosine-3'-phosphate
  modified_base 18: mod_base = OTHER; note = 2'-O-methylguanosine-3'-phosphate
  modified_base 19: mod_base = OTHER; note = 2'-O-methylcytidine-3'-phosphate
  modified_base 20: mod_base = OTHER; note = 2'-O-methyluridine-3'-phosphate
  modified_base 21: mod_base = OTHER; note = 2'-O-methyluridine-3'-phosphate N-[tris(N-acetylgalactosamine-alkyl)-amidodecanoyl)]-4-hydr oxyprolinol Hyp-(GalNAc-alkyl)3
ggccagagcaccgaggagctt

SEQ ID NO: 352 - RNA, 21 nt, synthetic construct
  source 1..21: mol_type = other RNA; note = Description of Artificial Sequence: Synthetic oligonucleotide
  modified_base 1: mod_base = OTHER; note = 2'-O-methylguanosine-3'- phosphorothioate
  modified_base 2: mod_base = OTHER; note = 2'-O-methylcytidine-3'- phosphorothioate
  modified_base 3: mod_base = OTHER; note = 2'-O-methyluridine-3'-phosphate
  modified_base 4: mod_base = OTHER; note = 2'-O-methylguanosine-3'-phosphate
  modified_base 5: mod_base = OTHER; note = 2'-O-methylcytidine-3'-phosphate
  modified_base 6: mod_base = OTHER; note = 2'-O-methylguanosine-3'-phosphate
  modified_base 7: mod_base = OTHER; note = 2'-fluoroguanosine-3'-phosphate
  modified_base 8: mod_base = OTHER; note = 2'-O-methylguanosine-3'-phosphate
  modified_base 9: mod_base = OTHER; note = 2'-fluorouridine-3'-phosphate
  modified_base 10: mod_base = OTHER; note = 2'-fluoroguanosine-3'-phosphate
  modified_base 11: mod_base = OTHER; note = 2'-fluorocytidine-3'-phosphate
  modified_base 12: mod_base = OTHER; note = 2'-O-methylguanosine-3'-phosphate
  modified_base 13: mod_base = OTHER; note = 2'-O-methylcytidine-3'-phosphate
  modified_base 14: mod_base = OTHER; note = 2'-O-methylcytidine-3'-phosphate
  modified_base 15: mod_base = OTHER; note = 2'-O-methyluridine-3'-phosphate
  modified_base 16: mod_base = OTHER; note = 2'-O-methylcytidine-3'-phosphate
  modified_base 17: mod_base = OTHER; note = 2'-O-methylguanosine-3'-phosphate
  modified_base 18: mod_base = OTHER; note = 2'-O-methylcytidine-3'-phosphate
  modified_base 19: mod_base = OTHER; note = 2'-O-methylcytidine-3'-phosphate
  modified_base 20: mod_base = OTHER; note = 2'-O-methyluridine-3'-phosphate
  modified_base 21: mod_base = OTHER; note = 2'-O-methyluridine-3'-phosphate N-[tris(N-acetylgalactosamine-alkyl)-amidodecanoyl)]-4-hydr oxyprolinol Hyp-(GalNAc-alkyl)3
gctgcgggtgcgcctcgcctt

SEQ ID NO: 353 - RNA, 21 nt, synthetic construct
  source 1..21: mol_type = other RNA; note = Description of Artificial Sequence: Synthetic oligonucleotide
  modified_base 1: mod_base = OTHER; note = 2'-O-methylguanosine-3'- phosphorothioate
  modified_base 2: mod_base = OTHER; note = 2'-O-methyluridine-3'-phosphorothioate
  modified_base 3: mod_base = OTHER; note = 2'-O-methylguanosine-3'-phosphate
  modified_base 4: mod_base = OTHER; note = 2'-O-methylcytidine-3'-phosphate
  modified_base 5: mod_base = OTHER; note = 2'-O-methylguanosine-3'-phosphate
  modified_base 6: mod_base = OTHER; note = 2'-O-methylcytidine-3'-phosphate
  modified_base 7: mod_base = OTHER; note = 2'-fluorocytidine-3'-phosphate
  modified_base 8: mod_base = OTHER; note = 2'-O-methyluridine-3'-phosphate
  modified_base 9: mod_base = OTHER; note = 2'-fluorocytidine-3'-phosphate
  modified_base 10: mod_base = OTHER; note = 2'-fluoroguanosine-3'-phosphate
  modified_base 11: mod_base = OTHER; note = 2'-fluorocytidine-3'-phosphate
  modified_base 12: mod_base = OTHER; note = 2'-O-methylcytidine-3'-phosphate
  modified_base 13: mod_base = OTHER; note = 2'-O-methyluridine-3'-phosphate
  modified_base 14: mod_base = OTHER; note = 2'-O-methylcytidine-3'-phosphate
  modified_base 15: mod_base = OTHER; note = 2'-O-methylcytidine-3'-phosphate
  modified_base 16: mod_base = OTHER; note = 2'-O-methylcytidine-3'-phosphate
  modified_base 17: mod_base = OTHER; note = 2'-O-methyladenosine-3'-phosphate
  modified_base 18: mod_base = OTHER; note = 2'-O-methylcytidine-3'-phosphate
  modified_base 19: mod_base = OTHER; note = 2'-O-methylcytidine-3'-phosphate
  modified_base 20: mod_base = OTHER; note = 2'-O-methyluridine-3'-phosphate
  modified_base 21: mod_base = OTHER; note = 2'-O-methyluridine-3'-phosphate N-[tris(N-acetylgalactosamine-alkyl)-amidodecanoyl)]-4-hydr oxyprolinol Hyp-(GalNAc-alkyl)3
gtgcgcctcgcctcccacctt

SEQ ID NO: 354 - RNA, 21 nt, synthetic construct
  source 1..21: mol_type = other RNA; note = Description of Artificial Sequence: Synthetic oligonucleotide
  modified_base 1: mod_base = OTHER; note = 2'-O-methylcytidine-3'- phosphorothioate
  modified_base 2: mod_base = OTHER; note = 2'-O-methylguanosine-3'- phosphorothioate
  modified_base 3: mod_base = OTHER; note = 2'-O-methylcytidine-3'-phosphate
  modified_base 4: mod_base = OTHER; note = 2'-O-methylcytidine-3'-phosphate
  modified_base 5: mod_base = OTHER; note = 2'-O-methyluridine-3'-phosphate
  modified_base 6: mod_base = OTHER; note = 2'-O-methylcytidine-3'-phosphate
  modified_base 7: mod_base = OTHER; note = 2'-fluorocytidine-3'-phosphate
  modified_base 8: mod_base = OTHER; note = 2'-O-methylcytidine-3'-phosphate
  modified_base 9: mod_base = OTHER; note = 2'-fluoroadenosine-3'-phosphate
  modified_base 10: mod_base = OTHER; note = 2'-fluorocytidine-3'-phosphate
  modified_base 11: mod_base = OTHER; note = 2'-fluorocytidine-3'-phosphate
  modified_base 12: mod_base = OTHER; note = 2'-O-methyluridine-3'-phosphate
  modified_base 13: mod_base = OTHER; note = 2'-O-methylguanosine-3'-phosphate
  modified_base 14: mod_base = OTHER; note = 2'-O-methylcytidine-3'-phosphate
  modified_base 15: mod_base = OTHER; note = 2'-O-methylguanosine-3'-phosphate
  modified_base 16: mod_base = OTHER; note = 2'-O-methylcytidine-3'-phosphate
  modified_base 17: mod_base = OTHER; note = 2'-O-methyladenosine-3'-phosphate
  modified_base 18: mod_base = OTHER; note = 2'-O-methyladenosine-3'-phosphate
  modified_base 19: mod_base = OTHER; note = 2'-O-methylguanosine-3'-phosphate
  modified_base 20: mod_base = OTHER; note = 2'-O-methylcytidine-3'-phosphate
  modified_base 21: mod_base = OTHER; note = 2'-O-methyluridine-3'-phosphate N-[tris(N-acetylgalactosamine-alkyl)-amidodecanoyl)]-4-hydr oxyprolinol Hyp-(GalNAc-alkyl)3
cgcctcccacctgcgcaagct

SEQ ID NO: 355 - RNA, 21 nt, synthetic construct
  source 1..21: mol_type = other RNA; note = Description of Artificial Sequence: Synthetic oligonucleotide
  modified_base 1: mod_base = OTHER; note = 2'-O-methylcytidine-3'- phosphorothioate
  modified_base 2: mod_base = OTHER; note = 2'-O-methylcytidine-3'- phosphorothioate
  modified_base 3: mod_base = OTHER; note = 2'-O-methylcytidine-3'-phosphate
  modified_base 4: mod_base = OTHER; note = 2'-O-methyladenosine-3'-phosphate
  modified_base 5: mod_base = OTHER; note = 2'-O-methylcytidine-3'-phosphate
  modified_base 6: mod_base = OTHER; note = 2'-O-methylcytidine-3'-phosphate
  modified_base 7: mod_base = OTHER; note = 2'-fluorouridine-3'-phosphate
  modified_base 8: mod_base = OTHER; note = 2'-O-methylguanosine-3'-phosphate
  modified_base 9: mod_base = OTHER; note = 2'-fluorocytidine-3'-phosphate
  modified_base 10: mod_base = OTHER; note = 2'-fluoroguanosine-3'-phosphate
  modified_base 11: mod_base = OTHER; note = 2'-fluorocytidine-3'-phosphate
  modified_base 12: mod_base = OTHER; note = 2'-O-methyladenosine-3'-phosphate
  modified_base 13: mod_base = OTHER; note = 2'-O-methyladenosine-3'-phosphate
  modified_base 14: mod_base = OTHER; note = 2'-O-methylguanosine-3'-phosphate
  modified_base 15: mod_base = OTHER; note = 2'-O-methylcytidine-3'-phosphate
  modified_base 16: mod_base = OTHER; note = 2'-O-methyluridine-3'-phosphate
  modified_base 17: mod_base = OTHER; note = 2'-O-methylguanosine-3'-phosphate
  modified_base 18: mod_base = OTHER; note = 2'-O-methylcytidine-3'-phosphate
  modified_base 19: mod_base = OTHER; note = 2'-O-methylguanosine-3'-phosphate
  modified_base 20: mod_base = OTHER; note = 2'-O-methyluridine-3'-phosphate
  modified_base 21: mod_base = OTHER; note = 2'-O-methyluridine-3'-phosphate N-[tris(N-acetylgalactosamine-alkyl)-amidodecanoyl)]-4-hydr oxyprolinol Hyp-(GalNAc-alkyl)3
cccacctgcgcaagctgcgtt

SEQ ID NO: 356 - RNA, 21 nt, synthetic construct
  source 1..21: mol_type = other RNA; note = Description of Artificial Sequence: Synthetic oligonucleotide
  modified_base 1: mod_base = OTHER; note = 2'-O-methylcytidine-3'- phosphorothioate
  modified_base 2: mod_base = OTHER; note = 2'-O-methyluridine-3'-phosphorothioate
  modified_base 3: mod_base = OTHER; note = 2'-O-methylguanosine-3'-phosphate
  modified_base 4: mod_base = OTHER; note = 2'-O-methylcytidine-3'-phosphate
  modified_base 5: mod_base = OTHER; note = 2'-O-methylguanosine-3'-phosphate
  modified_base 6: mod_base = OTHER; note = 2'-O-methylcytidine-3'-phosphate
  modified_base 7: mod_base = OTHER; note = 2'-fluoroadenosine-3'-phosphate
  modified_base 8: mod_base = OTHER; note = 2'-O-methyladenosine-3'-phosphate
  modified_base 9: mod_base = OTHER; note = 2'-fluoroguanosine-3'-phosphate
  modified_base 10: mod_base = OTHER; note = 2'-fluorocytidine-3'-phosphate
  modified_base 11: mod_base = OTHER; note = 2'-fluorouridine-3'-phosphate
  modified_base 12: mod_base = OTHER; note = 2'-O-methylguanosine-3'-phosphate
  modified_base 13: mod_base = OTHER; note = 2'-O-methylcytidine-3'-phosphate
  modified_base 14: mod_base = OTHER; note = 2'-O-methylguanosine-3'-phosphate
  modified_base 15: mod_base = OTHER; note = 2'-O-methyluridine-3'-phosphate
  modified_base 16: mod_base = OTHER; note = 2'-O-methyladenosine-3'-phosphate
  modified_base 17: mod_base = OTHER; note = 2'-O-methyladenosine-3'-phosphate
  modified_base 18: mod_base = OTHER; note = 2'-O-methylguanosine-3'-phosphate
  modified_base 19: mod_base = OTHER; note = 2'-O-methylcytidine-3'-phosphate
  modified_base 20: mod_base = OTHER; note = 2'-O-methylguanosine-3'-phosphate
  modified_base 21: mod_base = OTHER; note = 2'-O-methyluridine-3'-phosphate N-[tris(N-acetylgalactosamine-alkyl)-amidodecanoyl)]-4-hydr oxyprolinol Hyp-(GalNAc-alkyl)3
ctgcgcaagctgcgtaagcgt

SEQ ID NO: 357 - RNA, 21 nt, synthetic construct
  source 1..21: mol_type = other RNA; note = Description of Artificial Sequence: Synthetic oligonucleotide
  modified_base 1: mod_base = OTHER; note = 2'-O-methyladenosine-3'- phosphorothioate
  modified_base 2: mod_base = OTHER; note = 2'-O-methyladenosine-3'- phosphorothioate
  modified_base 3: mod_base = OTHER; note = 2'-O-methylguanosine-3'-phosphate
  modified_base 4: mod_base = OTHER; note = 2'-O-methylcytidine-3'-phosphate
  modified_base 5: mod_base = OTHER; note = 2'-O-methyluridine-3'-phosphate
  modified_base 6: mod_base = OTHER; note = 2'-O-methylguanosine-3'-phosphate
  modified_base 7: mod_base = OTHER; note = 2'-fluorocytidine-3'-phosphate
  modified_base 8: mod_base = OTHER; note = 2'-O-methylguanosine-3'-phosphate
  modified_base 9: mod_base = OTHER; note = 2'-fluorouridine-3'-phosphate
  modified_base 10: mod_base = OTHER; note = 2'-fluoroadenosine-3'-phosphate
  modified_base 11: mod_base = OTHER; note = 2'-fluoroadenosine-3'-phosphate
  modified_base 12: mod_base = OTHER; note = 2'-O-methylguanosine-3'-phosphate
  modified_base 13: mod_base = OTHER; note = 2'-O-methylcytidine-3'-phosphate
  modified_base 14: mod_base = OTHER; note = 2'-O-methylguanosine-3'-phosphate
  modified_base 15: mod_base = OTHER; note = 2'-O-methylguanosine-3'-phosphate
  modified_base 16: mod_base = OTHER; note = 2'-O-methylcytidine-3'-phosphate
  modified_base 17: mod_base = OTHER; note = 2'-O-methyluridine-3'-phosphate
  modified_base 18: mod_base = OTHER; note = 2'-O-methylcytidine-3'-phosphate
  modified_base 19: mod_base = OTHER; note = 2'-O-methylcytidine-3'-phosphate
  modified_base 20: mod_base = OTHER; note = 2'-O-methyluridine-3'-phosphate
  modified_base 21: mod_base = OTHER; note = 2'-O-methyluridine-3'-phosphate N-[tris(N-acetylgalactosamine-alkyl)-amidodecanoyl)]-4-hydr oxyprolinol Hyp-(GalNAc-alkyl)3
aagctgcgtaagcggctcctt

SEQ ID NO: 358 - RNA, 21 nt, synthetic construct
  source 1..21: mol_type = other RNA; note = Description of Artificial Sequence: Synthetic oligonucleotide
  modified_base 1: mod_base = OTHER; note = 2'-O-methylguanosine-3'- phosphorothioate
  modified_base 2: mod_base = OTHER; note = 2'-O-methyluridine-3'-phosphorothioate
  modified_base 3: mod_base = OTHER; note = 2'-O-methyladenosine-3'-phosphate
  modified_base 4: mod_base = OTHER; note = 2'-O-methyladenosine-3'-phosphate
  modified_base 5: mod_base = OTHER; note = 2'-O-methylguanosine-3'-phosphate
  modified_base 6: mod_base = OTHER; note = 2'-O-methylcytidine-3'-phosphate
  modified_base 7: mod_base = OTHER; note = 2'-fluoroguanosine-3'-phosphate
  modified_base 8: mod_base = OTHER; note = 2'-O-methylguanosine-3'-phosphate
  modified_base 9: mod_base = OTHER; note = 2'-fluorocytidine-3'-phosphate
  modified_base 10: mod_base = OTHER; note = 2'-fluorouridine-3'-phosphate
  modified_base 11: mod_base = OTHER; note = 2'-fluorocytidine-3'-phosphate
  modified_base 12: mod_base = OTHER; note = 2'-O-methylcytidine-3'-phosphate
  modified_base 13: mod_base = OTHER; note = 2'-O-methyluridine-3'-phosphate
  modified_base 14: mod_base = OTHER; note = 2'-O-methylcytidine-3'-phosphate
  modified_base 15: mod_base = OTHER; note = 2'-O-methylcytidine-3'-phosphate
  modified_base 16: mod_base = OTHER; note = 2'-O-methylguanosine-3'-phosphate
  modified_base 17: mod_base = OTHER; note = 2'-O-methylcytidine-3'-phosphate
  modified_base 18: mod_base = OTHER; note = 2'-O-methylguanosine-3'-phosphate
  modified_base 19: mod_base = OTHER; note = 2'-O-methyladenosine-3'-phosphate
  modified_base 20: mod_base = OTHER; note = 2'-O-methyluridine-3'-phosphate
  modified_base 21: mod_base = OTHER; note = 2'-O-methyluridine-3'-phosphate N-[tris(N-acetylgalactosamine-alkyl)-amidodecanoyl)]-4-hydr oxyprolinol Hyp-(GalNAc-alkyl)3
gtaagcggctcctccgcgatt

SEQ ID NO: 359 - RNA, 21 nt, synthetic construct
  source 1..21: mol_type = other RNA; note = Description of Artificial Sequence: Synthetic oligonucleotide
  modified_base 1: mod_base = OTHER; note = 2'-O-methylguanosine-3'- phosphorothioate
  modified_base 2: mod_base = OTHER; note = 2'-O-methylguanosine-3'- phosphorothioate
  modified_base 3: mod_base = OTHER; note = 2'-O-methylcytidine-3'-phosphate
  modified_base 4: mod_base = OTHER; note = 2'-O-methyluridine-3'-phosphate
  modified_base 5: mod_base = OTHER; note = 2'-O-methylcytidine-3'-phosphate
  modified_base 6: mod_base = OTHER; note = 2'-O-methylcytidine-3'-phosphate
  modified_base 7: mod_base = OTHER; note = 2'-fluorouridine-3'-phosphate
  modified_base 8: mod_base = OTHER; note = 2'-O-methylcytidine-3'-phosphate
  modified_base 9: mod_base = OTHER; note = 2'-fluorocytidine-3'-phosphate
  modified_base 10: mod_base = OTHER; note = 2'-fluoroguanosine-3'-phosphate
  modified_base 11: mod_base = OTHER; note = 2'-fluorocytidine-3'-phosphate
  modified_base 12: mod_base = OTHER; note = 2'-O-methylguanosine-3'-phosphate
  modified_base 13: mod_base = OTHER; note = 2'-O-methyladenosine-3'-phosphate
  modified_base 14: mod_base = OTHER; note = 2'-O-methyluridine-3'-phosphate
  modified_base 15: mod_base = OTHER; note = 2'-O-methylguanosine-3'-phosphate
  modified_base 16: mod_base = OTHER; note = 2'-O-methylcytidine-3'-phosphate
  modified_base 17: mod_base = OTHER; note = 2'-O-methylcytidine-3'-phosphate
  modified_base 18: mod_base = OTHER; note = 2'-O-methylguanosine-3'-phosphate
  modified_base 19: mod_base = OTHER; note = 2'-O-methyladenosine-3'-phosphate
  modified_base 20: mod_base = OTHER; note = 2'-O-methyluridine-3'-phosphate
  modified_base 21: mod_base = OTHER; note = 2'-O-methyluridine-3'-phosphate N-[tris(N-acetylgalactosamine-alkyl)-amidodecanoyl)]-4-hydr oxyprolinol Hyp-(GalNAc-alkyl)3
ggctcctccgcgatgccgatt

SEQ ID NO: 360 - RNA, 21 nt, synthetic construct
  source 1..21: mol_type = other RNA; note = Description of Artificial Sequence: Synthetic oligonucleotide
  modified_base 1: mod_base = OTHER; note = 2'-O-methylcytidine-3'- phosphorothioate
  modified_base 2: mod_base = OTHER; note = 2'-O-methyluridine-3'-phosphorothioate
  modified_base 3: mod_base = OTHER; note = 2'-O-methylcytidine-3'-phosphate
  modified_base 4: mod_base = OTHER; note = 2'-O-methylcytidine-3'-phosphate
  modified_base 5: mod_base = OTHER; note = 2'-O-methylguanosine-3'-phosphate
  modified_base 6: mod_base = OTHER; note = 2'-O-methylcytidine-3'-phosphate
  modified_base 7: mod_base = OTHER; note = 2'-fluoroguanosine-3'-phosphate
  modified_base 8: mod_base = OTHER; note = 2'-O-methyladenosine-3'-phosphate
  modified_base 9: mod_base = OTHER; note = 2'-fluorouridine-3'-phosphate
  modified_base 10: mod_base = OTHER; note = 2'-fluoroguanosine-3'-phosphate
  modified_base 11: mod_base = OTHER; note = 2'-fluorocytidine-3'-phosphate
  modified_base 12: mod_base = OTHER; note = 2'-O-methylcytidine-3'-phosphate
  modified_base 13: mod_base = OTHER; note = 2'-O-methylguanosine-3'-phosphate
  modified_base 14: mod_base = OTHER; note = 2'-O-methyladenosine-3'-phosphate
  modified_base 15: mod_base = OTHER; note = 2'-O-methyluridine-3'-phosphate
  modified_base 16: mod_base = OTHER; note = 2'-O-methylguanosine-3'-phosphate
  modified_base 17: mod_base = OTHER; note = 2'-O-methyladenosine-3'-phosphate
  modified_base 18: mod_base = OTHER; note = 2'-O-methylcytidine-3'-phosphate
  modified_base 19: mod_base = OTHER; note = 2'-O-methylcytidine-3'-phosphate
  modified_base 20: mod_base = OTHER; note = 2'-O-methyluridine-3'-phosphate
  modified_base 21: mod_base = OTHER; note = 2'-O-methyluridine-3'-phosphate N-[tris(N-acetylgalactosamine-alkyl)-amidodecanoyl)]-4-hydr oxyprolinol Hyp-(GalNAc-alkyl)3
ctccgcgatgccgatgacctt

SEQ ID NO: 361 - RNA, 21 nt, synthetic construct
  source 1..21: mol_type = other RNA; note = Description of Artificial Sequence: Synthetic oligonucleotide
  modified_base 1: mod_base = OTHER; note = 2'-O-methylguanosine-3'- phosphorothioate
  modified_base 2: mod_base = OTHER; note = 2'-O-methyladenosine-3'- phosphorothioate
  modified_base 3: mod_base = OTHER; note = 2'-O-methyluridine-3'-phosphate
  modified_base 4: mod_base = OTHER; note = 2'-O-methylguanosine-3'-phosphate
  modified_base 5: mod_base = OTHER; note = 2'-O-methylcytidine-3'-phosphate
  modified_base 6: mod_base = OTHER; note = 2'-O-methylcytidine-3'-phosphate
  modified_base 7: mod_base = OTHER; note = 2'-fluoroguanosine-3'-phosphate
  modified_base 8: mod_base = OTHER; note = 2'-O-methyladenosine-3'-phosphate
  modified_base 9: mod_base = OTHER; note = 2'-fluorouridine-3'-phosphate
  modified_base 10: mod_base = OTHER; note = 2'-fluoroguanosine-3'-phosphate
  modified_base 11: mod_base = OTHER; note = 2'-fluoroadenosine-3'-phosphate
  modified_base 12: mod_base = OTHER; note = 2'-O-methylcytidine-3'-phosphate
  modified_base 13: mod_base = OTHER; note = 2'-O-methylcytidine-3'-phosphate
  modified_base 14: mod_base = OTHER; note = 2'-O-methyluridine-3'-phosphate
  modified_base 15: mod_base = OTHER; note = 2'-O-methylguanosine-3'-phosphate
  modified_base 16: mod_base = OTHER; note = 2'-O-methylcytidine-3'-phosphate
  modified_base 17: mod_base = OTHER; note = 2'-O-methyladenosine-3'-phosphate
  modified_base 18: mod_base = OTHER; note = 2'-O-methylguanosine-3'-phosphate
  modified_base 19: mod_base = OTHER; note = 2'-O-methyladenosine-3'-phosphate
  modified_base 20: mod_base = OTHER; note = 2'-O-methyladenosine-3'-phosphate
  modified_base 21: mod_base = OTHER; note = 2'-O-methyluridine-3'-phosphate N-[tris(N-acetylgalactosamine-alkyl)-amidodecanoyl)]-4-hydr oxyprolinol Hyp-(GalNAc-alkyl)3
gatgccgatgacctgcagaat

SEQ ID NO: 362 - RNA, 21 nt, synthetic construct
  source 1..21: mol_type = other RNA; note = Description of Artificial Sequence: Synthetic oligonucleotide
  modified_base 1: mod_base = OTHER; note = 2'-O-methylguanosine-3'- phosphorothioate
  modified_base 2: mod_base = OTHER; note = 2'-O-methyladenosine-3'- phosphorothioate
  modified_base 3: mod_base = OTHER; note = 2'-O-methyluridine-3'-phosphate
  modified_base 4: mod_base = OTHER; note = 2'-O-methylguanosine-3'-phosphate
  modified_base 5: mod_base = OTHER; note = 2'-O-methyladenosine-3'-phosphate
  modified_base 6: mod_base = OTHER; note = 2'-O-methylcytidine-3'-phosphate
  modified_base 7: mod_base = OTHER; note = 2'-fluorocytidine-3'-phosphate
  modified_base 8: mod_base = OTHER; note = 2'-O-methyluridine-3'-phosphate
  modified_base 9: mod_base = OTHER; note = 2'-fluoroguanosine-3'-phosphate
  modified_base 10: mod_base = OTHER; note = 2'-fluorocytidine-3'-phosphate
  modified_base 11: mod_base = OTHER; note = 2'-fluoroadenosine-3'-phosphate
  modified_base 12: mod_base = OTHER; note = 2'-O-methylguanosine-3'-phosphate
  modified_base 13: mod_base = OTHER; note = 2'-O-methyladenosine-3'-phosphate
  modified_base 14: mod_base = OTHER; note = 2'-O-methyladenosine-3'-phosphate
  modified_base 15: mod_base = OTHER; note = 2'-O-methylguanosine-3'-phosphate
  modified_base 16: mod_base = OTHER; note = 2'-O-methylcytidine-3'-phosphate
  modified_base 17: mod_base = OTHER; note = 2'-O-methylguanosine-3'-phosphate
  modified_base 18: mod_base = OTHER; note = 2'-O-methylcytidine-3'-phosphate
  modified_base 19: mod_base = OTHER; note = 2'-O-methylcytidine-3'-phosphate
  modified_base 20: mod_base = OTHER; note = 2'-O-methyluridine-3'-phosphate
  modified_base 21: mod_base = OTHER; note = 2'-O-methyluridine-3'-phosphate N-[tris(N-acetylgalactosamine-alkyl)-amidodecanoyl)]-4-hydr oxyprolinol Hyp-(GalNAc-alkyl)3
gatgacctgcagaagcgcctt

SEQ ID NO: 363 - RNA, 21 nt, synthetic construct
  source 1..21: mol_type = other RNA; note = Description of Artificial Sequence: Synthetic oligonucleotide
  modified_base 1: mod_base = OTHER; note = 2'-O-methylcytidine-3'- phosphorothioate
  modified_base 2: mod_base = OTHER; note = 2'-O-methyluridine-3'-phosphorothioate
  modified_base 3: mod_base = OTHER; note = 2'-O-methylguanosine-3'-phosphate
  modified_base 4: mod_base = OTHER; note = 2'-O-methylcytidine-3'-phosphate
  modified_base 5: mod_base = OTHER; note = 2'-O-methyladenosine-3'-phosphate
  modified_base 6: mod_base = OTHER; note = 2'-O-methylguanosine-3'-phosphate
  modified_base 7: mod_base = OTHER; note = 2'-fluoroadenosine-3'-phosphate
  modified_base 8: mod_base = OTHER; note = 2'-O-methyladenosine-3'-phosphate
  modified_base 9: mod_base = OTHER; note = 2'-fluoroguanosine-3'-phosphate
  modified_base 10: mod_base = OTHER; note = 2'-fluorocytidine-3'-phosphate
  modified_base 11: mod_base = OTHER; note = 2'-fluoroguanosine-3'-phosphate
  modified_base 12: mod_base = OTHER; note = 2'-O-methylcytidine-3'-phosphate
  modified_base 13: mod_base = OTHER; note = 2'-O-methylcytidine-3'-phosphate
  modified_base 14: mod_base = OTHER; note = 2'-O-methyluridine-3'-phosphate
  modified_base 15: mod_base = OTHER; note = 2'-O-methylguanosine-3'-phosphate
  modified_base 16: mod_base = OTHER; note = 2'-O-methylguanosine-3'-phosphate
  modified_base 17: mod_base = OTHER; note = 2'-O-methylcytidine-3'-phosphate
  modified_base 18: mod_base = OTHER; note = 2'-O-methyladenosine-3'-phosphate
  modified_base 19: mod_base = OTHER; note = 2'-O-methylguanosine-3'-phosphate
  modified_base 20: mod_base = OTHER; note = 2'-O-methyluridine-3'-phosphate
  modified_base 21: mod_base = OTHER; note = 2'-O-methyluridine-3'-phosphate N-[tris(N-acetylgalactosamine-alkyl)-amidodecanoyl)]-4-hydr oxyprolinol Hyp-(GalNAc-alkyl)3
ctgcagaagcgcctggcagtt

SEQ ID NO: 364 - RNA, 21 nt, synthetic construct
  source 1..21: mol_type = other RNA; note = Description of Artificial Sequence: Synthetic oligonucleotide
  modified_base 1: mod_base = OTHER; note = 2'-O-methyladenosine-3'- phosphorothioate
  modified_base 2: mod_base = OTHER; note = 2'-O-methyladenosine-3'- phosphorothioate
  modified_base 3: mod_base = OTHER; note = 2'-O-methylguanosine-3'-phosphate
  modified_base 4: mod_base = OTHER; note = 2'-O-methylcytidine-3'-phosphate
  modified_base 5: mod_base = OTHER; note = 2'-O-methylguanosine-3'-phosphate
  modified_base 6: mod_base = OTHER; note = 2'-O-methylcytidine-3'-phosphate
  modified_base 7: mod_base = OTHER; note = 2'-fluorocytidine-3'-phosphate
  modified_base 8: mod_base = OTHER; note = 2'-O-methyluridine-3'-phosphate
  modified_base 9: mod_base = OTHER; note = 2'-fluoroguanosine-3'-phosphate
  modified_base 10: mod_base = OTHER; note = 2'-fluoroguanosine-3'-phosphate
  modified_base 11: mod_base = OTHER; note = 2'-fluorocytidine-3'-phosphate
  modified_base 12: mod_base = OTHER; note = 2'-O-methyladenosine-3'-phosphate
  modified_base 13: mod_base = OTHER; note = 2'-O-methylguanosine-3'-phosphate
  modified_base 14: mod_base = OTHER; note = 2'-O-methyluridine-3'-phosphate
  modified_base 15: mod_base = OTHER; note = 2'-O-methylguanosine-3'-phosphate
  modified_base 16: mod_base = OTHER; note = 2'-O-methyluridine-3'-phosphate
  modified_base 17: mod_base = OTHER; note = 2'-O-methyladenosine-3'-phosphate
  modified_base 18: mod_base = OTHER; note = 2'-O-methylcytidine-3'-phosphate
  modified_base 19: mod_base = OTHER; note = 2'-O-methylcytidine-3'-phosphate
  modified_base 20: mod_base = OTHER; note = 2'-O-methyladenosine-3'-phosphate
  modified_base 21: mod_base = OTHER; note = 2'-O-methyluridine-3'-phosphate N-[tris(N-acetylgalactosamine-alkyl)-amidodecanoyl)]-4-hydr oxyprolinol Hyp-(GalNAc-alkyl)3
aagcgcctggcagtgtaccat

SEQ ID NO: 365 - RNA, 21 nt, synthetic construct
  source 1..21: mol_type = other RNA; note = Description of Artificial Sequence: Synthetic oligonucleotide
  modified_base 1: mod_base = OTHER; note = 2'-O-methylcytidine-3'- phosphorothioate
  modified_base 2: mod_base = OTHER; note = 2'-O-methyluridine-3'-phosphorothioate
  modified_base 3: mod_base = OTHER; note = 2'-O-methylguanosine-3'-phosphate
  modified_base 4: mod_base = OTHER; note = 2'-O-methylguanosine-3'-phosphate
  modified_base 5: mod_base = OTHER; note = 2'-O-methylcytidine-3'-phosphate
  modified_base 6: mod_base = OTHER; note = 2'-O-methyladenosine-3'-phosphate
  modified_base 7: mod_base = OTHER; note = 2'-fluoroguanosine-3'-phosphate
  modified_base 8: mod_base = OTHER; note = 2'-O-methyluridine-3'-phosphate
  modified_base 9: mod_base = OTHER; note = 2'-fluoroguanosine-3'-phosphate
  modified_base 10: mod_base = OTHER; note = 2'-fluorouridine-3'-phosphate
  modified_base 11: mod_base = OTHER; note = 2'-fluoroadenosine-3'-phosphate
  modified_base 12: mod_base = OTHER; note = 2'-O-methylcytidine-3'-phosphate
  modified_base 13: mod_base = OTHER; note = 2'-O-methylcytidine-3'-phosphate
  modified_base 14: mod_base = OTHER; note = 2'-O-methyladenosine-3'-phosphate
  modified_base 15: mod_base = OTHER; note = 2'-O-methylguanosine-3'-phosphate
  modified_base 16: mod_base = OTHER; note = 2'-O-methylguanosine-3'-phosphate
  modified_base 17: mod_base = OTHER; note = 2'-O-methylcytidine-3'-phosphate
  modified_base 18: mod_base = OTHER; note = 2'-O-methylcytidine-3'-phosphate
  modified_base 19: mod_base = OTHER; note = 2'-O-methylguanosine-3'-phosphate
  modified_base 20: mod_base = OTHER; note = 2'-O-methylguanosine-3'-phosphate
  modified_base 21: mod_base = OTHER; note = 2'-O-methyluridine-3'-phosphate N-[tris(N-acetylgalactosamine-alkyl)-amidodecanoyl)]-4-hydr oxyprolinol Hyp-(GalNAc-alkyl)3
ctggcagtgtaccaggccggt

SEQ ID NO: 366 - RNA, 21 nt, synthetic construct
  source 1..21: mol_type = other RNA; note = Description of Artificial Sequence: Synthetic oligonucleotide
  modified_base 1: mod_base = OTHER; note = 2'-O-methylguanosine-3'- phosphorothioate
  modified_base 2: mod_base = OTHER; note = 2'-O-methyladenosine-3'- phosphorothioate
  modified_base 3: mod_base = OTHER; note = 2'-O-methylguanosine-3'-phosphate
  modified_base 4: mod_base = OTHER; note = 2'-O-methylcytidine-3'-phosphate
  modified_base 5: mod_base = OTHER; note = 2'-O-methylguanosine-3'-phosphate
  modified_base 6: mod_base = OTHER; note = 2'-O-methylcytidine-3'-phosphate
  modified_base 7: mod_base = OTHER; note = 2'-fluoroguanosine-3'-phosphate
  modified_base 8: mod_base = OTHER; note = 2'-O-methylguanosine-3'-phosphate
  modified_base 9: mod_base = OTHER; note = 2'-fluorocytidine-3'-phosphate
  modified_base 10: mod_base = OTHER; note = 2'-fluorocytidine-3'-phosphate
  modified_base 11: mod_base = OTHER; note = 2'-fluorouridine-3'-phosphate
  modified_base 12: mod_base = OTHER; note = 2'-O-methylcytidine-3'-phosphate
  modified_base 13: mod_base = OTHER; note = 2'-O-methyladenosine-3'-phosphate
  modified_base 14: mod_base = OTHER; note = 2'-O-methylguanosine-3'-phosphate
  modified_base 15: mod_base = OTHER; note = 2'-O-methylcytidine-3'-phosphate
  modified_base 16: mod_base = OTHER; note = 2'-O-methylguanosine-3'-phosphate
  modified_base 17: mod_base = OTHER; note = 2'-O-methylcytidine-3'-phosphate
  modified_base 18: mod_base = OTHER; note = 2'-O-methylcytidine-3'-phosphate
  modified_base 19: mod_base = OTHER; note = 2'-O-methyladenosine-3'-phosphate
  modified_base 20: mod_base = OTHER; note = 2'-O-methyluridine-3'-phosphate
  modified_base 21: mod_base = OTHER; note = 2'-O-methyluridine-3'-phosphate N-[tris(N-acetylgalactosamine-alkyl)-amidodecanoyl)]-4-hydr oxyprolinol Hyp-(GalNAc-alkyl)3
gagcgcggcctcagcgccatt

SEQ ID NO: 367 - RNA, 21 nt, synthetic construct
  source 1..21: mol_type = other RNA; note = Description of Artificial Sequence: Synthetic oligonucleotide
  modified_base 1: mod_base = OTHER; note = 2'-O-methylcytidine-3'- phosphorothioate
  modified_base 2: mod_base = OTHER; note = 2'-O-methylguanosine-3'- phosphorothioate
  modified_base 3: mod_base = OTHER; note = 2'-O-methylguanosine-3'-phosphate
  modified_base 4: mod_base = OTHER; note = 2'-O-methylcytidine-3'-phosphate
  modified_base 5: mod_base = OTHER; note = 2'-O-methylcytidine-3'-phosphate
  modified_base 6: mod_base = OTHER; note = 2'-O-methyluridine-3'-phosphate
  modified_base 7: mod_base = OTHER; note = 2'-fluorocytidine-3'-phosphate
  modified_base 8: mod_base = OTHER; note = 2'-O-methyladenosine-3'-phosphate
  modified_base 9: mod_base = OTHER; note = 2'-fluoroguanosine-3'-phosphate
  modified_base 10: mod_base = OTHER; note = 2'-fluorocytidine-3'-phosphate
  modified_base 11: mod_base = OTHER; note = 2'-fluoroguanosine-3'-phosphate
  modified_base 12: mod_base = OTHER; note = 2'-O-methylcytidine-3'-phosphate
  modified_base 13: mod_base = OTHER; note = 2'-O-methylcytidine-3'-phosphate
  modified_base 14: mod_base = OTHER; note = 2'-O-methyladenosine-3'-phosphate
  modified_base 15: mod_base = OTHER; note = 2'-O-methyluridine-3'-phosphate
  modified_base 16: mod_base = OTHER; note = 2'-O-methylcytidine-3'-phosphate
  modified_base 17: mod_base = OTHER; note = 2'-O-methylcytidine-3'-phosphate
  modified_base 18: mod_base = OTHER; note = 2'-O-methylguanosine-3'-phosphate
  modified_base 19: mod_base = OTHER; note = 2'-O-methylcytidine-3'-phosphate
  modified_base 20: mod_base = OTHER; note = 2'-O-methylguanosine-3'-phosphate
  modified_base 21: mod_base = OTHER; note = 2'-O-methyluridine-3'-phosphate N-[tris(N-acetylgalactosamine-alkyl)-amidodecanoyl)]-4-hydr oxyprolinol Hyp-(GalNAc-alkyl)3
cggcctcagcgccatccgcgt

SEQ ID NO: 368 - RNA, 21 nt, synthetic construct
  source 1..21: mol_type = other RNA; note = Description of Artificial Sequence: Synthetic oligonucleotide
  modified_base 1: mod_base = OTHER; note = 2'-O-methyladenosine-3'- phosphorothioate
  modified_base 2: mod_base = OTHER; note = 2'-O-methylguanosine-3'- phosphorothioate
  modified_base 3: mod_base = OTHER; note = 2'-O-methylcytidine-3'-phosphate
  modified_base 4: mod_base = OTHER; note = 2'-O-methylguanosine-3'-phosphate
  modified_base 5: mod_base = OTHER; note = 2'-O-methylcytidine-3'-phosphate
  modified_base 6: mod_base = OTHER; note = 2'-O-methylcytidine-3'-phosphate
  modified_base 7: mod_base = OTHER; note = 2'-fluoroadenosine-3'-phosphate
  modified_base 8: mod_base = OTHER; note = 2'-O-methyluridine-3'-phosphate
  modified_base 9: mod_base = OTHER; note = 2'-fluorocytidine-3'-phosphate
  modified_base 10: mod_base = OTHER; note = 2'-fluorocytidine-3'-phosphate
  modified_base 11: mod_base = OTHER; note = 2'-fluoroguanosine-3'-phosphate
  modified_base 12: mod_base = OTHER; note = 2'-O-methylcytidine-3'-phosphate
  modified_base 13: mod_base = OTHER; note = 2'-O-methylguanosine-3'-phosphate
  modified_base 14: mod_base = OTHER; note = 2'-O-methyladenosine-3'-phosphate
  modified_base 15: mod_base = OTHER; note = 2'-O-methylguanosine-3'-phosphate
  modified_base 16: mod_base = OTHER; note = 2'-O-methylcytidine-3'-phosphate
  modified_base 17: mod_base = OTHER; note = 2'-O-methylguanosine-3'-phosphate
  modified_base 18: mod_base = OTHER; note = 2'-O-methylcytidine-3'-phosphate
  modified_base 19: mod_base = OTHER; note = 2'-O-methylcytidine-3'-phosphate
  modified_base 20: mod_base = OTHER; note = 2'-O-methyluridine-3'-phosphate
  modified_base 21: mod_base = OTHER; note = 2'-O-methyluridine-3'-phosphate N-[tris(N-acetylgalactosamine-alkyl)-amidodecanoyl)]-4-hydr oxyprolinol Hyp-(GalNAc-alkyl)3
agcgccatccgcgagcgcctt

SEQ ID NO: 369 - RNA, 21 nt, synthetic construct
  source 1..21: mol_type = other RNA; note = Description of Artificial Sequence: Synthetic oligonucleotide
  modified_base 1: mod_base = OTHER; note = 2'-O-methyluridine-3'-phosphorothioate
  modified_base 2: mod_base = OTHER; note = 2'-O-methylguanosine-3'- phosphorothioate
  modified_base 3: mod_base = OTHER; note = 2'-O-methylguanosine-3'-phosphate
  modified_base 4: mod_base = OTHER; note = 2'-O-methylguanosine-3'-phosphate
  modified_base 5: mod_base = OTHER; note = 2'-O-methylguanosine-3'-phosphate
  modified_base 6: mod_base = OTHER; note = 2'-O-methylcytidine-3'-phosphate
  modified_base 7: mod_base = OTHER; note = 2'-fluorocytidine-3'-phosphate
  modified_base 8: mod_base = OTHER; note = 2'-O-methylcytidine-3'-phosphate
  modified_base 9: mod_base = OTHER; note = 2'-fluorocytidine-3'-phosphate
  modified_base 10: mod_base = OTHER; note = 2'-fluorouridine-3'-phosphate
  modified_base 11: mod_base = OTHER; note = 2'-fluoroguanosine-3'-phosphate
  modified_base 12: mod_base = OTHER; note = 2'-O-methylguanosine-3'-phosphate
  modified_base 13: mod_base = OTHER; note = 2'-O-methyluridine-3'-phosphate
  modified_base 14: mod_base = OTHER; note = 2'-O-methylguanosine-3'-phosphate
  modified_base 15: mod_base = OTHER; note = 2'-O-methylguanosine-3'-phosphate
  modified_base 16: mod_base = OTHER; note = 2'-O-methyladenosine-3'-phosphate
  modified_base 17: mod_base = OTHER; note = 2'-O-methyladenosine-3'-phosphate
  modified_base 18: mod_base = OTHER; note = 2'-O-methylcytidine-3'-phosphate
  modified_base 19: mod_base = OTHER; note = 2'-O-methyladenosine-3'-phosphate
  modified_base 20: mod_base = OTHER; note = 2'-O-methylguanosine-3'-phosphate
  modified_base 21: mod_base = OTHER; note = 2'-O-methyluridine-3'-phosphate N-[tris(N-acetylgalactosamine-alkyl)-amidodecanoyl)]-4-hydr oxyprolinol Hyp-(GalNAc-alkyl)3
tggggcccctggtggaacagt

SEQ ID NO: 370 - RNA, 21 nt, synthetic construct
  source 1..21: mol_type = other RNA; note = Description of Artificial Sequence: Synthetic oligonucleotide
  modified_base 1: mod_base = OTHER; note = 2'-O-methylcytidine-3'- phosphorothioate
  modified_base 2: mod_base = OTHER; note = 2'-O-methylcytidine-3'- phosphorothioate
  modified_base 3: mod_base = OTHER; note = 2'-O-methylcytidine-3'-phosphate
  modified_base 4: mod_base = OTHER; note = 2'-O-methylcytidine-3'-phosphate
  modified_base 5: mod_base = OTHER; note = 2'-O-methyluridine-3'-phosphate
  modified_base 6: mod_base = OTHER; note = 2'-O-methylguanosine-3'-phosphate
  modified_base 7: mod_base = OTHER; note = 2'-fluoroguanosine-3'-phosphate
  modified_base 8: mod_base = OTHER; note = 2'-O-methyluridine-3'-phosphate
  modified_base 9: mod_base = OTHER; note = 2'-fluoroguanosine-3'-phosphate
  modified_base 10: mod_base = OTHER; note = 2'-fluoroguanosine-3'-phosphate
  modified_base 11: mod_base = OTHER; note = 2'-fluoroadenosine-3'-phosphate
  modified_base 12: mod_base = OTHER; note = 2'-O-methyladenosine-3'-phosphate
  modified_base 13: mod_base = OTHER; note = 2'-O-methylcytidine-3'-phosphate
  modified_base 14: mod_base = OTHER; note = 2'-O-methyladenosine-3'-phosphate
  modified_base 15: mod_base = OTHER; note = 2'-O-methylguanosine-3'-phosphate
  modified_base 16: mod_base = OTHER; note = 2'-O-methylguanosine-3'-phosphate
  modified_base 17: mod_base = OTHER; note = 2'-O-methylguanosine-3'-phosphate
  modified_base 18: mod_base = OTHER; note = 2'-O-methylcytidine-3'-phosphate
  modified_base 19: mod_base = OTHER; note = 2'-O-methylcytidine-3'-phosphate
  modified_base 20: mod_base = OTHER; note = 2'-O-methylguanosine-3'-phosphate
  modified_base 21: mod_base = OTHER; note = 2'-O-methyluridine-3'-phosphate N-[tris(N-acetylgalactosamine-alkyl)-amidodecanoyl)]-4-hydr oxyprolinol Hyp-(GalNAc-alkyl)3
cccctggtggaacagggccgt

SEQ ID NO: 371 - RNA, 21 nt, synthetic construct
  source 1..21: mol_type = other RNA; note = Description of Artificial Sequence: Synthetic oligonucleotide
  modified_base 1: mod_base = OTHER; note = 2'-O-methylcytidine-3'- phosphorothioate
  modified_base 2: mod_base = OTHER; note = 2'-O-methylguanosine-3'- phosphorothioate
  modified_base 3: mod_base = OTHER; note = 2'-O-methylcytidine-3'-phosphate
  modified_base 4: mod_base = OTHER; note = 2'-O-methylguanosine-3'-phosphate
  modified_base 5: mod_base = OTHER; note = 2'-O-methyluridine-3'-phosphate
  modified_base 6: mod_base = OTHER; note = 2'-O-methylguanosine-3'-phosphate
  modified_base 7: mod_base = OTHER; note = 2'-fluorocytidine-3'-phosphate
  modified_base 8: mod_base = OTHER; note = 2'-O-methylguanosine-3'-phosphate
  modified_base 9: mod_base = OTHER; note = 2'-fluoroguanosine-3'-phosphate
  modified_base 10: mod_base = OTHER; note = 2'-fluoroguanosine-3'-phosphate
  modified_base 11: mod_base = OTHER; note = 2'-fluorocytidine-3'-phosphate
  modified_base 12: mod_base = OTHER; note = 2'-O-methylcytidine-3'-phosphate
  modified_base 13: mod_base = OTHER; note = 2'-O-methylguanosine-3'-phosphate
  modified_base 14: mod_base = OTHER; note = 2'-O-methylcytidine-3'-phosphate
  modified_base 15: mod_base = OTHER; note = 2'-O-methylcytidine-3'-phosphate
  modified_base 16: mod_base = OTHER; note = 2'-O-methyladenosine-3'-phosphate
  modified_base 17: mod_base = OTHER; note = 2'-O-methylcytidine-3'-phosphate
  modified_base 18: mod_base = OTHER; note = 2'-O-methyluridine-3'-phosphate
  modified_base 19: mod_base = OTHER; note = 2'-O-methylguanosine-3'-phosphate
  modified_base 20: mod_base = OTHER; note = 2'-O-methyluridine-3'-phosphate
  modified_base 21: mod_base = OTHER; note = 2'-O-methyluridine-3'-phosphate N-[tris(N-acetylgalactosamine-alkyl)-amidodecanoyl)]-4-hydr oxyprolinol Hyp-(GalNAc-alkyl)3
cgcgtgcgggccgccactgtt

SEQ ID NO: 372 - RNA, 21 nt, synthetic construct
  source 1..21: mol_type = other RNA; note = Description of Artificial Sequence: Synthetic oligonucleotide
  modified_base 1: mod_base = OTHER; note = 2'-O-methylguanosine-3'- phosphorothioate
  modified_base 2: mod_base = OTHER; note = 2'-O-methylcytidine-3'- phosphorothioate
  modified_base 3: mod_base = OTHER; note = 2'-O-methylcytidine-3'-phosphate
  modified_base 4: mod_base = OTHER; note = 2'-O-methylguanosine-3'-phosphate
  modified_base 5: mod_base = OTHER; note = 2'-O-methylcytidine-3'-phosphate
  modified_base 6: mod_base = OTHER; note = 2'-O-methylcytidine-3'-phosphate
  modified_base 7: mod_base = OTHER; note = 2'-fluoroadenosine-3'-phosphate
  modified_base 8: mod_base = OTHER; note = 2'-O-methylcytidine-3'-phosphate
  modified_base 9: mod_base = OTHER; note = 2'-fluorouridine-3'-phosphate
  modified_base 10: mod_base = OTHER; note = 2'-fluoroguanosine-3'-phosphate
  modified_base 11: mod_base = OTHER; note = 2'-fluorouridine-3'-phosphate
  modified_base 12: mod_base = OTHER; note = 2'-O-methylguanosine-3'-phosphate
  modified_base 13: mod_base = OTHER; note = 2'-O-methylguanosine-3'-phosphate
  modified_base 14: mod_base = OTHER; note = 2'-O-methylguanosine-3'-phosphate
  modified_base 15: mod_base = OTHER; note = 2'-O-methylcytidine-3'-phosphate
  modified_base 16: mod_base = OTHER; note = 2'-O-methyluridine-3'-phosphate
  modified_base 17: mod_base = OTHER; note = 2'-O-methylcytidine-3'-phosphate
  modified_base 18: mod_base = OTHER; note = 2'-O-methylcytidine-3'-phosphate
  modified_base 19: mod_base = OTHER; note = 2'-O-methylcytidine-3'-phosphate
  modified_base 20: mod_base = OTHER; note = 2'-O-methyluridine-3'-phosphate
  modified_base 21: mod_base = OTHER; note = 2'-O-methyluridine-3'-phosphate N-[tris(N-acetylgalactosamine-alkyl)-amidodecanoyl)]-4-hydr oxyprolinol Hyp-(GalNAc-alkyl)3
gccgccactgtgggctccctt

SEQ ID NO: 373 - RNA, 21 nt, synthetic construct
  source 1..21: mol_type = other RNA; note = Description of Artificial Sequence: Synthetic oligonucleotide
  modified_base 1: mod_base = OTHER; note = 2'-O-methylcytidine-3'- phosphorothioate
  modified_base 2: mod_base = OTHER; note = 2'-O-methylcytidine-3'- phosphorothioate
  modified_base 3: mod_base = OTHER; note = 2'-O-methyluridine-3'-phosphate
  modified_base 4: mod_base = OTHER; note = 2'-O-methylguanosine-3'-phosphate
  modified_base 5: mod_base = OTHER; note = 2'-O-methylguanosine-3'-phosphate
  modified_base 6: mod_base = OTHER; note = 2'-O-methylcytidine-3'-phosphate
  modified_base 7: mod_base = OTHER; note = 2'-fluorocytidine-3'-phosphate
  modified_base 8: mod_base = OTHER; note = 2'-O-methylguanosine-3'-phosphate
  modified_base 9: mod_base = OTHER; note = 2'-fluoroguanosine-3'-phosphate
  modified_base 10: mod_base = OTHER; note = 2'-fluorocytidine-3'-phosphate
  modified_base 11: mod_base = OTHER; note = 2'-fluorocytidine-3'-phosphate
  modified_base 12: mod_base = OTHER; note = 2'-O-methyladenosine-3'-phosphate
  modified_base 13: mod_base = OTHER; note = 2'-O-methylguanosine-3'-phosphate
  modified_base 14: mod_base = OTHER; note = 2'-O-methylcytidine-3'-phosphate
  modified_base 15: mod_base = OTHER; note = 2'-O-methylcytidine-3'-phosphate
  modified_base 16: mod_base = OTHER; note = 2'-O-methylguanosine-3'-phosphate
  modified_base 17: mod_base = OTHER; note = 2'-O-methylcytidine-3'-phosphate
  modified_base 18: mod_base = OTHER; note = 2'-O-methyluridine-3'-phosphate
  modified_base 19: mod_base = OTHER; note = 2'-O-methyladenosine-3'-phosphate
  modified_base 20: mod_base = OTHER; note = 2'-O-methylcytidine-3'-phosphate
  modified_base 21: mod_base = OTHER; note = 2'-O-methyluridine-3'-phosphate N-[tris(N-acetylgalactosamine-alkyl)-amidodecanoyl)]-4-hydr oxyprolinol Hyp-(GalNAc-alkyl)3
cctggccggccagccgctact

SEQ ID NO: 374 - RNA, 21 nt, synthetic construct
  source 1..21: mol_type = other RNA; note = Description of Artificial Sequence: Synthetic oligonucleotide
  modified_base 1: mod_base = OTHER; note = 2'-O-methylguanosine-3'- phosphorothioate
  modified_base 2: mod_base = OTHER; note = 2'-O-methylguanosine-3'- phosphorothioate
  modified_base 3: mod_base = OTHER; note = 2'-O-methylcytidine-3'-phosphate
  modified_base 4: mod_base = OTHER; note = 2'-O-methylcytidine-3'-phosphate
  modified_base 5: mod_base = OTHER; note = 2'-O-methyladenosine-3'-phosphate
  modified_base 6: mod_base = OTHER; note = 2'-O-methylguanosine-3'-phosphate
  modified_base 7: mod_base = OTHER; note = 2'-fluorocytidine-3'-phosphate
  modified_base 8: mod_base = OTHER; note = 2'-O-methylcytidine-3'-phosphate
  modified_base 9: mod_base = OTHER; note = 2'-fluoroguanosine-3'-phosphate
  modified_base 10: mod_base = OTHER; note = 2'-fluorocytidine-3'-phosphate
  modified_base 11: mod_base = OTHER; note = 2'-fluorouridine-3'-phosphate
  modified_base 12: mod_base = OTHER; note = 2'-O-methyladenosine-3'-phosphate
  modified_base 13: mod_base = OTHER; note = 2'-O-methylcytidine-3'-phosphate
  modified_base 14: mod_base = OTHER; note = 2'-O-methyladenosine-3'-phosphate
  modified_base 15: mod_base = OTHER; note = 2'-O-methylguanosine-3'-phosphate
  modified_base 16: mod_base = OTHER; note = 2'-O-methylguanosine-3'-phosphate
  modified_base 17: mod_base = OTHER; note = 2'-O-methyladenosine-3'-phosphate
  modified_base 18: mod_base = OTHER; note = 2'-O-methylguanosine-3'-phosphate
  modified_base 19: mod_base = OTHER; note = 2'-O-methylcytidine-3'-phosphate
  modified_base 20: mod_base = OTHER; note = 2'-O-methylguanosine-3'-phosphate
  modified_base 21: mod_base = OTHER; note = 2'-O-methyluridine-3'-phosphate N-[tris(N-acetylgalactosamine-alkyl)-amidodecanoyl)]-4-hydr oxyprolinol Hyp-(GalNAc-alkyl)3
ggccagccgctacaggagcgt

SEQ ID NO: 375 - RNA, 21 nt, synthetic construct
  source 1..21: mol_type = other RNA; note = Description of Artificial Sequence: Synthetic oligonucleotide
  modified_base 1: mod_base = OTHER; note = 2'-O-methylguanosine-3'- phosphorothioate
  modified_base 2: mod_base = OTHER; note = 2'-O-methylcytidine-3'- phosphorothioate
  modified_base 3: mod_base = OTHER; note = 2'-O-methylcytidine-3'-phosphate
  modified_base 4: mod_base = OTHER; note = 2'-O-methylguanosine-3'-phosphate
  modified_base 5: mod_base = OTHER; note = 2'-O-methylcytidine-3'-phosphate
  modified_base 6: mod_base = OTHER; note = 2'-O-methyluridine-3'-phosphate
  modified_base 7: mod_base = OTHER; note = 2'-fluoroadenosine-3'-phosphate
  modified_base 8: mod_base = OTHER; note = 2'-O-methylcytidine-3'-phosphate
  modified_base 9: mod_base = OTHER; note = 2'-fluoroadenosine-3'-phosphate
  modified_base 10: mod_base = OTHER; note = 2'-fluoroguanosine-3'-phosphate
  modified_base 11: mod_base = OTHER; note = 2'-fluoroguanosine-3'-phosphate
  modified_base 12: mod_base = OTHER; note = 2'-O-methyladenosine-3'-phosphate
  modified_base 13: mod_base = OTHER; note = 2'-O-methylguanosine-3'-phosphate
  modified_base 14: mod_base = OTHER; note = 2'-O-methylcytidine-3'-phosphate
  modified_base 15: mod_base = OTHER; note = 2'-O-methylguanosine-3'-phosphate
  modified_base 16: mod_base = OTHER; note = 2'-O-methylguanosine-3'-phosphate
  modified_base 17: mod_base = OTHER; note = 2'-O-methylguanosine-3'-phosphate
  modified_base 18: mod_base = OTHER; note = 2'-O-methylcytidine-3'-phosphate
  modified_base 19: mod_base = OTHER; note = 2'-O-methylcytidine-3'-phosphate
  modified_base 20: mod_base = OTHER; note = 2'-O-methylcytidine-3'-phosphate
  modified_base 21: mod_base = OTHER; note = 2'-O-methyluridine-3'-phosphate N-[tris(N-acetylgalactosamine-alkyl)-amidodecanoyl)]-4-hydr oxyprolinol Hyp-(GalNAc-alkyl)3
gccgctacaggagcgggccct

SEQ ID NO: 376 - RNA, 21 nt, synthetic construct
  source 1..21: mol_type = other RNA; note = Description of Artificial Sequence: Synthetic oligonucleotide
  modified_base 1: mod_base = OTHER; note = 2'-O-methylguanosine-3'- phosphorothioate
  modified_base 2: mod_base = OTHER; note = 2'-O-methylcytidine-3'- phosphorothioate
  modified_base 3: mod_base = OTHER; note = 2'-O-methylguanosine-3'-phosphate
  modified_base 4: mod_base = OTHER; note = 2'-O-methylcytidine-3'-phosphate
  modified_base 5: mod_base = OTHER; note = 2'-O-methylguanosine-3'-phosphate
  modified_base 6: mod_base = OTHER; note = 2'-O-methylguanosine-3'-phosphate
  modified_base 7: mod_base = OTHER; note = 2'-fluoroadenosine-3'-phosphate
  modified_base 8: mod_base = OTHER; note = 2'-O-methyluridine-3'-phosphate
  modified_base 9: mod_base = OTHER; note = 2'-fluoroguanosine-3'-phosphate
  modified_base 10: mod_base = OTHER; note = 2'-fluoroguanosine-3'-phosphate
  modified_base 11: mod_base = OTHER; note = 2'-fluoroadenosine-3'-phosphate
  modified_base 12: mod_base = OTHER; note = 2'-O-methylguanosine-3'-phosphate
  modified_base 13: mod_base = OTHER; note = 2'-O-methylguanosine-3'-phosphate
  modified_base 14: mod_base = OTHER; note = 2'-O-methyladenosine-3'-phosphate
  modified_base 15: mod_base = OTHER; note = 2'-O-methylguanosine-3'-phosphate
  modified_base 16: mod_base = OTHER; note = 2'-O-methyladenosine-3'-phosphate
  modified_base 17: mod_base = OTHER; note = 2'-O-methyluridine-3'-phosphate
  modified_base 18: mod_base = OTHER; note = 2'-O-methylguanosine-3'-phosphate
  modified_base 19: mod_base = OTHER; note = 2'-O-methylguanosine-3'-phosphate
  modified_base 20: mod_base = OTHER; note = 2'-O-methylguanosine-3'-phosphate
  modified_base 21: mod_base = OTHER; note = 2'-O-methyluridine-3'-phosphate N-[tris(N-acetylgalactosamine-alkyl)-amidodecanoyl)]-4-hydr oxyprolinol Hyp-(GalNAc-alkyl)3
gcgcggatggaggagatgggt

SEQ ID NO: 377 - RNA, 21 nt, synthetic construct
  source 1..21: mol_type = other RNA; note = Description of Artificial Sequence: Synthetic oligonucleotide
  modified_base 1: mod_base = OTHER; note = 2'-O-methylcytidine-3'- phosphorothioate
  modified_base 2: mod_base = OTHER; note = 2'-O-methylguanosine-3'- phosphorothioate
  modified_base 3: mod_base = OTHER; note = 2'-O-methylcytidine-3'-phosphate
  modified_base 4: mod_base = OTHER; note = 2'-O-methylguanosine-3'-phosphate
  modified_base 5: mod_base = OTHER; note = 2'-O-methyladenosine-3'-phosphate
  modified_base 6: mod_base = OTHER; note = 2'-O-methylcytidine-3'-phosphate
  modified_base 7: mod_base = OTHER; note = 2'-fluorocytidine-3'-phosphate
  modified_base 8: mod_base = OTHER; note = 2'-O-methylguanosine-3'-phosphate
  modified_base 9: mod_base = OTHER; note = 2'-fluorocytidine-3'-phosphate
  modified_base 10: mod_base = OTHER; note = 2'-fluorocytidine-3'-phosphate
  modified_base 11: mod_base = OTHER; note = 2'-fluorouridine-3'-phosphate
  modified_base 12: mod_base = OTHER; note = 2'-O-methylguanosine-3'-phosphate
  modified_base 13: mod_base = OTHER; note = 2'-O-methylguanosine-3'-phosphate
  modified_base 14: mod_base = OTHER; note = 2'-O-methyladenosine-3'-phosphate
  modified_base 15: mod_base = OTHER; note = 2'-O-methylcytidine-3'-phosphate
  modified_base 16: mod_base = OTHER; note = 2'-O-methylguanosine-3'-phosphate
  modified_base 17: mod_base = OTHER; note = 2'-O-methyladenosine-3'-phosphate
  modified_base 18: mod_base = OTHER; note = 2'-O-methylguanosine-3'-phosphate
  modified_base 19: mod_base = OTHER; note = 2'-O-methylguanosine-3'-phosphate
  modified_base 20: mod_base = OTHER; note = 2'-O-methyluridine-3'-phosphate
  modified_base 21: mod_base = OTHER; note = 2'-O-methyluridine-3'-phosphate N-[tris(N-acetylgalactosamine-alkyl)-amidodecanoyl)]-4-hydr oxyprolinol Hyp-(GalNAc-alkyl)3
cgcgaccgcctggacgaggtt

SEQ ID NO: 378 - RNA, 21 nt, synthetic construct
  source 1..21: mol_type = other RNA; note = Description of Artificial Sequence: Synthetic oligonucleotide
  modified_base 1: mod_base = OTHER; note = 2'-O-methylguanosine-3'- phosphorothioate
  modified_base 2: mod_base = OTHER; note = 2'-O-methylcytidine-3'- phosphorothioate
  modified_base 3: mod_base = OTHER; note = 2'-O-methylcytidine-3'-phosphate
  modified_base 4: mod_base = OTHER; note = 2'-O-methyluridine-3'-phosphate
  modified_base 5: mod_base = OTHER; note = 2'-O-methylguanosine-3'-phosphate
  modified_base 6: mod_base = OTHER; note = 2'-O-methylguanosine-3'-phosphate
  modified_base 7: mod_base = OTHER; note = 2'-fluoroadenosine-3'-phosphate
  modified_base 8: mod_base = OTHER; note = 2'-O-methylcytidine-3'-phosphate
  modified_base 9: mod_base = OTHER; note = 2'-fluoroguanosine-3'-phosphate
  modified_base 10: mod_base = OTHER; note = 2'-fluoroadenosine-3'-phosphate
  modified_base 11: mod_base = OTHER; note = 2'-fluoroguanosine-3'-phosphate
  modified_base 12: mod_base = OTHER; note = 2'-O-methylguanosine-3'-phosphate
  modified_base 13: mod_base = OTHER; note = 2'-O-methyluridine-3'-phosphate
  modified_base 14: mod_base = OTHER; note = 2'-O-methylguanosine-3'-phosphate
  modified_base 15: mod_base = OTHER; note = 2'-O-methyladenosine-3'-phosphate
  modified_base 16: mod_base = OTHER; note = 2'-O-methyladenosine-3'-phosphate
  modified_base 17: mod_base = OTHER; note = 2'-O-methylguanosine-3'-phosphate
  modified_base 18: mod_base = OTHER; note = 2'-O-methylguanosine-3'-phosphate
  modified_base 19: mod_base = OTHER; note = 2'-O-methyladenosine-3'-phosphate
  modified_base 20: mod_base = OTHER; note = 2'-O-methylguanosine-3'-phosphate
  modified_base 21: mod_base = OTHER; note = 2'-O-methyluridine-3'-phosphate N-[tris(N-acetylgalactosamine-alkyl)-amidodecanoyl)]-4-hydr oxyprolinol Hyp-(GalNAc-alkyl)3
gcctggacgaggtgaaggagt

SEQ ID NO: 379 - RNA, 21 nt, synthetic construct
  source 1..21: mol_type = other RNA; note = Description of Artificial Sequence: Synthetic oligonucleotide
  modified_base 1: mod_base = OTHER; note = 2'-O-methylguanosine-3'- phosphorothioate
  modified_base 2: mod_base = OTHER; note = 2'-O-methyladenosine-3'- phosphorothioate
  modified_base 3: mod_base = OTHER; note = 2'-O-methylcytidine-3'-phosphate
  modified_base 4: mod_base = OTHER; note = 2'-O-methylguanosine-3'-phosphate
  modified_base 5: mod_base = OTHER; note = 2'-O-methyladenosine-3'-phosphate
  modified_base 6: mod_base = OTHER; note = 2'-O-methylguanosine-3'-phosphate
  modified_base 7: mod_base = OTHER; note = 2'-fluoroguanosine-3'-phosphate
  modified_base 8: mod_base = OTHER; note = 2'-O-methyluridine-3'-phosphate
  modified_base 9: mod_base = OTHER; note = 2'-fluoroguanosine-3'-phosphate
  modified_base 10: mod_base = OTHER; note = 2'-fluoroadenosine-3'-phosphate
  modified_base 11: mod_base = OTHER; note = 2'-fluoroadenosine-3'-phosphate
  modified_base 12: mod_base = OTHER; note = 2'-O-methylguanosine-3'-phosphate
  modified_base 13: mod_base = OTHER; note = 2'-O-methylguanosine-3'-phosphate
  modified_base 14: mod_base = OTHER; note = 2'-O-methyladenosine-3'-phosphate
  modified_base 15: mod_base = OTHER; note = 2'-O-methylguanosine-3'-phosphate
  modified_base 16: mod_base = OTHER; note = 2'-O-methylcytidine-3'-phosphate
  modified_base 17: mod_base = OTHER; note = 2'-O-methyladenosine-3'-phosphate
  modified_base 18: mod_base = OTHER; note = 2'-O-methylguanosine-3'-phosphate
  modified_base 19: mod_base = OTHER; note = 2'-O-methylguanosine-3'-phosphate
  modified_base 20: mod_base = OTHER; note = 2'-O-methyluridine-3'-phosphate
  modified_base 21: mod_base = OTHER; note = 2'-O-methyluridine-3'-phosphate N-[tris(N-acetylgalactosamine-alkyl)-amidodecanoyl)]-4-hydr oxyprolinol Hyp-(GalNAc-alkyl)3
gacgaggtgaaggagcaggtt

SEQ ID NO: 380 - RNA, 21 nt, synthetic construct
  source 1..21: mol_type = other RNA; note = Description of Artificial Sequence: Synthetic oligonucleotide
  modified_base 1: mod_base = OTHER; note = 2'-O-methylguanosine-3'- phosphorothioate
  modified_base 2: mod_base = OTHER; note = 2'-O-methylguanosine-3'- phosphorothioate
  modified_base 3: mod_base = OTHER; note = 2'-O-methyladenosine-3'-phosphate
  modified_base 4: mod_base = OTHER; note = 2'-O-methylguanosine-3'-phosphate
  modified_base 5: mod_base = OTHER; note = 2'-O-methylguanosine-3'-phosphate
  modified_base 6: mod_base = OTHER; note = 2'-O-methyluridine-3'-phosphate
  modified_base 7: mod_base = OTHER; note = 2'-fluoroguanosine-3'-phosphate
  modified_base 8: mod_base = OTHER; note = 2'-O-methylcytidine-3'-phosphate
  modified_base 9: mod_base = OTHER; note = 2'-fluoroguanosine-3'-phosphate
  modified_base 10: mod_base = OTHER; note = 2'-fluorocytidine-3'-phosphate
  modified_base 11: mod_base = OTHER; note = 2'-fluoroguanosine-3'-phosphate
  modified_base 12: mod_base = OTHER; note = 2'-O-methylcytidine-3'-phosphate
  modified_base 13: mod_base = OTHER; note = 2'-O-methylcytidine-3'-phosphate
  modified_base 14: mod_base = OTHER; note = 2'-O-methyladenosine-3'-phosphate
  modified_base 15: mod_base = OTHER; note = 2'-O-methyladenosine-3'-phosphate
  modified_base 16: mod_base = OTHER; note = 2'-O-methylguanosine-3'-phosphate
  modified_base 17: mod_base = OTHER; note = 2'-O-methylcytidine-3'-phosphate
  modified_base 18: mod_base = OTHER; note = 2'-O-methyluridine-3'-phosphate
  modified_base 19: mod_base = OTHER; note = 2'-O-methylguanosine-3'-phosphate
  modified_base 20: mod_base = OTHER; note = 2'-O-methylguanosine-3'-phosphate
  modified_base 21: mod_base = OTHER; note = 2'-O-methyluridine-3'-phosphate N-[tris(N-acetylgalactosamine-alkyl)-amidodecanoyl)]-4-hydr oxyprolinol Hyp-(GalNAc-alkyl)3
ggaggtgcgcgccaagctggt

SEQ ID NO: 381 - RNA, 21 nt, synthetic construct
  source 1..21: mol_type = other RNA; note = Description of Artificial Sequence: Synthetic oligonucleotide
  modified_base 1: mod_base = OTHER; note = 2'-O-methylcytidine-3'- phosphorothioate
  modified_base 2: mod_base = OTHER; note = 2'-O-methylguanosine-3'- phosphorothioate
  modified_base 3: mod_base = OTHER; note = 2'-O-methylcytidine-3'-phosphate
  modified_base 4: mod_base = OTHER; note = 2'-O-methylguanosine-3'-phosphate
  modified_base 5: mod_base = OTHER; note = 2'-O-methylcytidine-3'-phosphate
  modified_base 6: mod_base = OTHER; note = 2'-O-methylcytidine-3'-phosphate
  modified_base 7: mod_base = OTHER; note = 2'-fluoroadenosine-3'-phosphate
  modified_base 8: mod_base = OTHER; note = 2'-O-methyladenosine-3'-phosphate
  modified_base 9: mod_base = OTHER; note = 2'-fluoroguanosine-3'-phosphate
  modified_base 10: mod_base = OTHER; note = 2'-fluorocytidine-3'-phosphate
  modified_base 11: mod_base = OTHER; note = 2'-fluorouridine-3'-phosphate
  modified_base 12: mod_base = OTHER; note = 2'-O-methylguanosine-3'-phosphate
  modified_base 13: mod_base = OTHER; note = 2'-O-methylguanosine-3'-phosphate
  modified_base 14: mod_base = OTHER; note = 2'-O-methyladenosine-3'-phosphate
  modified_base 15: mod_base = OTHER; note = 2'-O-methylguanosine-3'-phosphate
  modified_base 16: mod_base = OTHER; note = 2'-O-methylguanosine-3'-phosphate
  modified_base 17: mod_base = OTHER; note = 2'-O-methyladenosine-3'-phosphate
  modified_base 18: mod_base = OTHER; note = 2'-O-methylguanosine-3'-phosphate
  modified_base 19: mod_base = OTHER; note = 2'-O-methylcytidine-3'-phosphate
  modified_base 20: mod_base = OTHER; note = 2'-O-methyladenosine-3'-phosphate
  modified_base 21: mod_base = OTHER; note = 2'-O-methyluridine-3'-phosphate N-[tris(N-acetylgalactosamine-alkyl)-amidodecanoyl)]-4-hydr oxyprolinol Hyp-(GalNAc-alkyl)3
cgcgccaagctggaggagcat

SEQ ID NO: 382 - RNA, 21 nt, synthetic construct
  source 1..21: mol_type = other RNA; note = Description of Artificial Sequence: Synthetic oligonucleotide
  modified_base 1: mod_base = OTHER; note = 2'-O-methylcytidine-3'- phosphorothioate
  modified_base 2: mod_base = OTHER; note = 2'-O-methyladenosine-3'- phosphorothioate
  modified_base 3: mod_base = OTHER; note = 2'-O-methylguanosine-3'-phosphate
  modified_base 4: mod_base = OTHER; note = 2'-O-methylguanosine-3'-phosphate
  modified_base 5: mod_base = OTHER; note = 2'-O-methylcytidine-3'-phosphate
  modified_base 6: mod_base = OTHER; note = 2'-O-methylcytidine-3'-phosphate
  modified_base 7: mod_base = OTHER; note = 2'-fluorocytidine-3'-phosphate
  modified_base 8: mod_base = OTHER; note = 2'-O-methyladenosine-3'-phosphate
  modified_base 9: mod_base = OTHER; note = 2'-fluoroguanosine-3'-phosphate
  modified_base 10: mod_base = OTHER; note = 2'-fluorocytidine-3'-phosphate
  modified_base 11: mod_base = OTHER; note = 2'-fluoroadenosine-3'-phosphate
  modified_base 12: mod_base = OTHER; note = 2'-O-methylguanosine-3'-phosphate
  modified_base 13: mod_base = OTHER; note = 2'-O-methyladenosine-3'-phosphate
  modified_base 14: mod_base = OTHER; note = 2'-O-methyluridine-3'-phosphate
  modified_base 15: mod_base = OTHER; note = 2'-O-methyladenosine-3'-phosphate
  modified_base 16: mod_base = OTHER; note = 2'-O-methylcytidine-3'-phosphate
  modified_base 17: mod_base = OTHER; note = 2'-O-methylguanosine-3'-phosphate
  modified_base 18: mod_base = OTHER; note = 2'-O-methylcytidine-3'-phosphate
  modified_base 19: mod_base = OTHER; note = 2'-O-methylcytidine-3'-phosphate
  modified_base 20: mod_base = OTHER; note = 2'-O-methyluridine-3'-phosphate
  modified_base 21: mod_base = OTHER; note = 2'-O-methyluridine-3'-phosphate N-[tris(N-acetylgalactosamine-alkyl)-amidodecanoyl)]-4-hydr oxyprolinol Hyp-(GalNAc-alkyl)3
caggcccagcagatacgcctt

SEQ ID NO: 383 - RNA, 21 nt, synthetic construct
  source 1..21: mol_type = other RNA; note = Description of Artificial Sequence: Synthetic oligonucleotide
  modified_base 1: mod_base = OTHER; note = 2'-O-methylcytidine-3'- phosphorothioate
  modified_base 2: mod_base = OTHER; note = 2'-O-methylcytidine-3'- phosphorothioate
  modified_base 3: mod_base = OTHER; note = 2'-O-methyladenosine-3'-phosphate
  modified_base 4: mod_base = OTHER; note = 2'-O-methylguanosine-3'-phosphate
  modified_base 5: mod_base = OTHER; note = 2'-O-methylcytidine-3'-phosphate
  modified_base 6: mod_base = OTHER; note = 2'-O-methyladenosine-3'-phosphate
  modified_base 7: mod_base = OTHER; note = 2'-fluoroguanosine-3'-phosphate
  modified_base 8: mod_base = OTHER; note = 2'-O-methyladenosine-3'-phosphate
  modified_base 9: mod_base = OTHER; note = 2'-fluorouridine-3'-phosphate
  modified_base 10: mod_base = OTHER; note = 2'-fluoroadenosine-3'-phosphate
  modified_base 11: mod_base = OTHER; note = 2'-fluorocytidine-3'-phosphate
  modified_base 12: mod_base = OTHER; note = 2'-O-methylguanosine-3'-phosphate
  modified_base 13: mod_base = OTHER; note = 2'-O-methylcytidine-3'-phosphate
  modified_base 14: mod_base = OTHER; note = 2'-O-methylcytidine-3'-phosphate
  modified_base 15: mod_base = OTHER; note = 2'-O-methyluridine-3'-phosphate
  modified_base 16: mod_base = OTHER; note = 2'-O-methylguanosine-3'-phosphate
  modified_base 17: mod_base = OTHER; note = 2'-O-methylcytidine-3'-phosphate
  modified_base 18: mod_base = OTHER; note = 2'-O-methyladenosine-3'-phosphate
  modified_base 19: mod_base = OTHER; note = 2'-O-methylguanosine-3'-phosphate
  modified_base 20: mod_base = OTHER; note = 2'-O-methylguanosine-3'-phosphate
  modified_base 21: mod_base = OTHER; note = 2'-O-methyluridine-3'-phosphate N-[tris(N-acetylgalactosamine-alkyl)-amidodecanoyl)]-4-hydr oxyprolinol Hyp-(GalNAc-alkyl)3
ccagcagatacgcctgcaggt

SEQ ID NO: 384 - RNA, 21 nt, synthetic construct
  source 1..21: mol_type = other RNA; note = Description of Artificial Sequence: Synthetic oligonucleotide
  modified_base 1: mod_base = OTHER; note = 2'-O-methylcytidine-3'- phosphorothioate
  modified_base 2: mod_base = OTHER; note = 2'-O-methylguanosine-3'- phosphorothioate
  modified_base 3: mod_base = OTHER; note = 2'-O-methylcytidine-3'-phosphate
  modified_base 4: mod_base = OTHER; note = 2'-O-methylcytidine-3'-phosphate
  modified_base 5: mod_base = OTHER; note = 2'-O-methyluridine-3'-phosphate
  modified_base 6: mod_base = OTHER; note = 2'-O-methylguanosine-3'-phosphate
  modified_base 7: mod_base = OTHER; note = 2'-fluorocytidine-3'-phosphate
  modified_base 8: mod_base = OTHER; note = 2'-O-methyladenosine-3'-phosphate
  modified_base 9: mod_base = OTHER; note = 2'-fluoroguanosine-3'-phosphate
  modified_base 10: mod_base = OTHER; note = 2'-fluoroguanosine-3'-phosphate
  modified_base 11: mod_base = OTHER; note = 2'-fluorocytidine-3'-phosphate
  modified_base 12: mod_base = OTHER; note = 2'-O-methylcytidine-3'-phosphate
  modified_base 13: mod_base = OTHER; note = 2'-O-methylguanosine-3'-phosphate
  modified_base 14: mod_base = OTHER; note = 2'-O-methyladenosine-3'-phosphate
  modified_base 15: mod_base = OTHER; note = 2'-O-methylguanosine-3'-phosphate
  modified_base 16: mod_base = OTHER; note = 2'-O-methylguanosine-3'-phosphate
  modified_base 17: mod_base = OTHER; note = 2'-O-methylcytidine-3'-phosphate
  modified_base 18: mod_base = OTHER; note = 2'-O-methylcytidine-3'-phosphate
  modified_base 19: mod_base = OTHER; note = 2'-O-methyluridine-3'-phosphate
  modified_base 20: mod_base = OTHER; note = 2'-O-methyluridine-3'-phosphate
  modified_base 21: mod_base = OTHER; note = 2'-O-methyluridine-3'-phosphate N-[tris(N-acetylgalactosamine-alkyl)-amidodecanoyl)]-4-hydr oxyprolinol Hyp-(GalNAc-alkyl)3
cgcctgcaggccgaggccttt

SEQ ID NO: 385 - RNA, 21 nt, synthetic construct
  source 1..21: mol_type = other RNA; note = Description of Artificial Sequence: Synthetic oligonucleotide
  modified_base 1: mod_base = OTHER; note = 2'-O-methylguanosine-3'- phosphorothioate
  modified_base 2: mod_base = OTHER; note = 2'-O-methylcytidine-3'- phosphorothioate
  modified_base 3: mod_base = OTHER; note = 2'-O-methyladenosine-3'-phosphate
  modified_base 4: mod_base = OTHER; note = 2'-O-methylguanosine-3'-phosphate
  modified_base 5: mod_base = OTHER; note = 2'-O-methylguanosine-3'-phosphate
  modified_base 6: mod_base = OTHER; note = 2'-O-methylcytidine-3'-phosphate
  modified_base 7: mod_base = OTHER; note = 2'-fluorocytidine-3'-phosphate
  modified_base 8: mod_base = OTHER; note = 2'-O-methylguanosine-3'-phosphate
  modified_base 9: mod_base = OTHER; note = 2'-fluoroadenosine-3'-phosphate
  modified_base 10: mod_base = OTHER; note = 2'-fluoroguanosine-3'-phosphate
  modified_base 11: mod_base = OTHER; note = 2'-fluoroguanosine-3'-phosphate
  modified_base 12: mod_base = OTHER; note = 2'-O-methylcytidine-3'-phosphate
  modified_base 13: mod_base = OTHER; note = 2'-O-methylcytidine-3'-phosphate
  modified_base 14: mod_base = OTHER; note = 2'-O-methyluridine-3'-phosphate
  modified_base 15: mod_base = OTHER; note = 2'-O-methyluridine-3'-phosphate
  modified_base 16: mod_base = OTHER; note = 2'-O-methylcytidine-3'-phosphate
  modified_base 17: mod_base = OTHER; note = 2'-O-methylcytidine-3'-phosphate
  modified_base 18: mod_base = OTHER; note = 2'-O-methyladenosine-3'-phosphate
  modified_base 19: mod_base = OTHER; note = 2'-O-methylguanosine-3'-phosphate
  modified_base 20: mod_base = OTHER; note = 2'-O-methylguanosine-3'-phosphate
  modified_base 21: mod_base = OTHER; note = 2'-O-methyluridine-3'-phosphate N-[tris(N-acetylgalactosamine-alkyl)-amidodecanoyl)]-4-hydr oxyprolinol Hyp-(GalNAc-alkyl)3
gcaggccgaggccttccaggt

SEQ ID NO: 386 - RNA, 21 nt, synthetic construct
  source 1..21: mol_type = other RNA; note = Description of Artificial Sequence: Synthetic oligonucleotide
  modified_base 1: mod_base = OTHER; note = 2'-O-methylcytidine-3'- phosphorothioate
  modified_base 2: mod_base = OTHER; note = 2'-O-methylcytidine-3'- phosphorothioate
  modified_base 3: mod_base = OTHER; note = 2'-O-methylguanosine-3'-phosphate
  modified_base 4: mod_base = OTHER; note = 2'-O-methyladenosine-3'-phosphate
  modified_base 5: mod_base = OTHER; note = 2'-O-methylguanosine-3'-phosphate
  modified_base 6: mod_base = OTHER; note = 2'-O-methylguanosine-3'-phosphate
  modified_base 7: mod_base = OTHER; note = 2'-fluorocytidine-3'-phosphate
  modified_base 8: mod_base = OTHER; note = 2'-O-methylcytidine-3'-phosphate
  modified_base 9: mod_base = OTHER; note = 2'-fluorouridine-3'-phosphate
  modified_base 10: mod_base = OTHER; note = 2'-fluorouridine-3'-phosphate
  modified_base 11: mod_base = OTHER; note = 2'-fluorocytidine-3'-phosphate
  modified_base 12: mod_base = OTHER; note = 2'-O-methylcytidine-3'-phosphate
  modified_base 13: mod_base = OTHER; note = 2'-O-methyladenosine-3'-phosphate
  modified_base 14: mod_base = OTHER; note = 2'-O-methylguanosine-3'-phosphate
  modified_base 15: mod_base = OTHER; note = 2'-O-methylguanosine-3'-phosphate
  modified_base 16: mod_base = OTHER; note = 2'-O-methylcytidine-3'-phosphate
  modified_base 17: mod_base = OTHER; note = 2'-O-methylcytidine-3'-phosphate
  modified_base 18: mod_base = OTHER; note = 2'-O-methylcytidine-3'-phosphate
  modified_base 19: mod_base = OTHER; note = 2'-O-methylguanosine-3'-phosphate
  modified_base 20: mod_base = OTHER; note = 2'-O-methylcytidine-3'-phosphate
  modified_base 21: mod_base = OTHER; note = 2'-O-methyluridine-3'-phosphate N-[tris(N-acetylgalactosamine-alkyl)-amidodecanoyl)]-4-hydr oxyprolinol Hyp-(GalNAc-alkyl)3
ccgaggccttccaggcccgct

SEQ ID NO: 387 - RNA, 21 nt, synthetic construct
  source 1..21: mol_type = other RNA; note = Description of Artificial Sequence: Synthetic oligonucleotide
  modified_base 1: mod_base = OTHER; note = 2'-O-methylguanosine-3'- phosphorothioate
  modified_base 2: mod_base = OTHER; note = 2'-O-methylcytidine-3'- phosphorothioate
  modified_base 3: mod_base = OTHER; note = 2'-O-methylcytidine-3'-phosphate
  modified_base 4: mod_base = OTHER; note = 2'-O-methyluridine-3'-phosphate
  modified_base 5: mod_base = OTHER; note = 2'-O-methyluridine-3'-phosphate
  modified_base 6: mod_base = OTHER; note = 2'-O-methylcytidine-3'-phosphate
  modified_base 7: mod_base = OTHER; note = 2'-fluorocytidine-3'-phosphate
  modified_base 8: mod_base = OTHER; note = 2'-O-methyladenosine-3'-phosphate
  modified_base 9: mod_base = OTHER; note = 2'-fluoroguanosine-3'-phosphate
  modified_base 10: mod_base = OTHER; note = 2'-fluoroguanosine-3'-phosphate
  modified_base 11: mod_base = OTHER; note = 2'-fluorocytidine-3'-phosphate
  modified_base 12: mod_base = OTHER; note = 2'-O-methylcytidine-3'-phosphate
  modified_base 13: mod_base = OTHER; note = 2'-O-methylcytidine-3'-phosphate
  modified_base 14: mod_base = OTHER; note = 2'-O-methylguanosine-3'-phosphate
  modified_base 15: mod_base = OTHER; note = 2'-O-methylcytidine-3'-phosphate
  modified_base 16: mod_base = OTHER; note = 2'-O-methylcytidine-3'-phosphate
  modified_base 17: mod_base = OTHER; note = 2'-O-methyluridine-3'-phosphate
  modified_base 18: mod_base = OTHER; note = 2'-O-methylcytidine-3'-phosphate
  modified_base 19: mod_base = OTHER; note = 2'-O-methyladenosine-3'-phosphate
  modified_base 20: mod_base = OTHER; note = 2'-O-methyladenosine-3'-phosphate
  modified_base 21: mod_base = OTHER; note = 2'-O-methyluridine-3'-phosphate N-[tris(N-acetylgalactosamine-alkyl)-amidodecanoyl)]-4-hydr oxyprolinol Hyp-(GalNAc-alkyl)3
gccttccaggcccgcctcaat

SEQ ID NO: 388 - RNA, 21 nt, synthetic construct
  source 1..21: mol_type = other RNA; note = Description of Artificial Sequence: Synthetic oligonucleotide
  modified_base 1: mod_base = OTHER; note = 2'-O-methylcytidine-3'- phosphorothioate
  modified_base 2: mod_base = OTHER; note = 2'-O-methylcytidine-3'- phosphorothioate
  modified_base 3: mod_base = OTHER; note = 2'-O-methyladenosine-3'-phosphate
  modified_base 4: mod_base = OTHER; note = 2'-O-methylguanosine-3'-phosphate
  modified_base 5: mod_base = OTHER; note = 2'-O-methylguanosine-3'-phosphate
  modified_base 6: mod_base = OTHER; note = 2'-O-methylcytidine-3'-phosphate
  modified_base 7: mod_base = OTHER; note = 2'-fluorocytidine-3'-phosphate
  modified_base 8: mod_base = OTHER; note = 2'-O-methylcytidine-3'-phosphate
  modified_base 9: mod_base = OTHER; note = 2'-fluoroguanosine-3'-phosphate
  modified_base 10: mod_base = OTHER; note = 2'-fluorocytidine-3'-phosphate
  modified_base 11: mod_base = OTHER; note = 2'-fluorocytidine-3'-phosphate
  modified_base 12: mod_base = OTHER; note = 2'-O-methyluridine-3'-phosphate
  modified_base 13: mod_base = OTHER; note = 2'-O-methylcytidine-3'-phosphate
  modified_base 14: mod_base = OTHER; note = 2'-O-methyladenosine-3'-phosphate
  modified_base 15: mod_base = OTHER; note = 2'-O-methyladenosine-3'-phosphate
  modified_base 16: mod_base = OTHER; note = 2'-O-methylguanosine-3'-phosphate
  modified_base 17: mod_base = OTHER; note = 2'-O-methyladenosine-3'-phosphate
  modified_base 18: mod_base = OTHER; note = 2'-O-methylguanosine-3'-phosphate
  modified_base 19: mod_base = OTHER; note = 2'-O-methylcytidine-3'-phosphate
  modified_base 20: mod_base = OTHER; note = 2'-O-methyluridine-3'-phosphate
  modified_base 21: mod_base = OTHER; note = 2'-O-methyluridine-3'-phosphate N-[tris(N-acetylgalactosamine-alkyl)-amidodecanoyl)]-4-hydr oxyprolinol Hyp-(GalNAc-alkyl)3
ccaggcccgcctcaagagctt

SEQ ID NO: 389 - RNA, 21 nt, synthetic construct
  source 1..21: mol_type = other RNA; note = Description of Artificial Sequence: Synthetic oligonucleotide
  modified_base 1: mod_base = OTHER; note = 2'-O-methylcytidine-3'- phosphorothioate
  modified_base 2: mod_base = OTHER; note = 2'-O-methylcytidine-3'- phosphorothioate
  modified_base 3: mod_base = OTHER; note = 2'-O-methylguanosine-3'-phosphate
  modified_base 4: mod_base = OTHER; note = 2'-O-methylcytidine-3'-phosphate
  modified_base 5: mod_base = OTHER; note = 2'-O-methylcytidine-3'-phosphate
  modified_base 6: mod_base = OTHER; note = 2'-O-methyluridine-3'-phosphate
  modified_base 7: mod_base = OTHER; note = 2'-fluorocytidine-3'-phosphate
  modified_base 8: mod_base = OTHER; note = 2'-O-methyladenosine-3'-phosphate
  modified_base 9: mod_base = OTHER; note = 2'-fluoroadenosine-3'-phosphate
  modified_base 10: mod_base = OTHER; note = 2'-fluoroguanosine-3'-phosphate
  modified_base 11: mod_base = OTHER; note = 2'-fluoroadenosine-3'-phosphate
  modified_base 12: mod_base = OTHER; note = 2'-O-methylguanosine-3'-phosphate
  modified_base 13: mod_base = OTHER; note = 2'-O-methylcytidine-3'-phosphate
  modified_base 14: mod_base = OTHER; note = 2'-O-methyluridine-3'-phosphate
  modified_base 15: mod_base = OTHER; note = 2'-O-methylguanosine-3'-phosphate
  modified_base 16: mod_base = OTHER; note = 2'-O-methylguanosine-3'-phosphate
  modified_base 17: mod_base = OTHER; note = 2'-O-methyluridine-3'-phosphate
  modified_base 18: mod_base = OTHER; note = 2'-O-methyluridine-3'-phosphate
  modified_base 19: mod_base = OTHER; note = 2'-O-methylcytidine-3'-phosphate
  modified_base 20: mod_base = OTHER; note = 2'-O-methylguanosine-3'-phosphate
  modified_base 21: mod_base = OTHER; note = 2'-O-methyluridine-3'-phosphate N-[tris(N-acetylgalactosamine-alkyl)-amidodecanoyl)]-4-hydr oxyprolinol Hyp-(GalNAc-alkyl)3
ccgcctcaagagctggttcgt

SEQ ID NO: 390 - RNA, 21 nt, synthetic construct
  source 1..21: mol_type = other RNA; note = Description of Artificial Sequence: Synthetic oligonucleotide
  modified_base 1: mod_base = OTHER; note = 2'-O-methylcytidine-3'- phosphorothioate
  modified_base 2: mod_base = OTHER; note = 2'-O-methyladenosine-3'- phosphorothioate
  modified_base 3: mod_base = OTHER; note = 2'-O-methyladenosine-3'-phosphate
  modified_base 4: mod_base = OTHER; note = 2'-O-methylguanosine-3'-phosphate
  modified_base 5: mod_base = OTHER; note = 2'-O-methyladenosine-3'-phosphate
  modified_base 6: mod_base = OTHER; note = 2'-O-methylguanosine-3'-phosphate
  modified_base 7: mod_base = OTHER; note = 2'-fluorocytidine-3'-phosphate
  modified_base 8: mod_base = OTHER; note = 2'-O-methyluridine-3'-phosphate
  modified_base 9: mod_base = OTHER; note = 2'-fluoroguanosine-3'-phosphate
  modified_base 10: mod_base = OTHER; note = 2'-fluoroguanosine-3'-phosphate
  modified_base 11: mod_base = OTHER; note = 2'-fluorouridine-3'-phosphate
  modified_base 12: mod_base = OTHER; note = 2'-O-methyluridine-3'-phosphate
  modified_base 13: mod_base = OTHER; note = 2'-O-methylcytidine-3'-phosphate
  modified_base 14: mod_base = OTHER; note = 2'-O-methylguanosine-3'-phosphate
  modified_base 15: mod_base = OTHER; note = 2'-O-methyladenosine-3'-phosphate
  modified_base 16: mod_base = OTHER; note = 2'-O-methylguanosine-3'-phosphate
  modified_base 17: mod_base = OTHER; note = 2'-O-methylcytidine-3'-phosphate
  modified_base 18: mod_base = OTHER; note = 2'-O-methylcytidine-3'-phosphate
  modified_base 19: mod_base = OTHER; note = 2'-O-methylcytidine-3'-phosphate
  modified_base 20: mod_base = OTHER; note = 2'-O-methylcytidine-3'-phosphate
  modified_base 21: mod_base = OTHER; note = 2'-O-methyluridine-3'-phosphate N-[tris(N-acetylgalactosamine-alkyl)-amidodecanoyl)]-4-hydr oxyprolinol Hyp-(GalNAc-alkyl)3
caagagctggttcgagcccct

SEQ ID NO: 391 - RNA, 21 nt, synthetic construct
  source 1..21: mol_type = other RNA; note = Description of Artificial Sequence: Synthetic oligonucleotide
  modified_base 1: mod_base = OTHER; note = 2'-O-methyladenosine-3'- phosphorothioate
  modified_base 2: mod_base = OTHER; note = 2'-O-methylguanosine-3'- phosphorothioate
  modified_base 3: mod_base = OTHER; note = 2'-O-methylcytidine-3'-phosphate
  modified_base 4: mod_base = OTHER; note = 2'-O-methylcytidine-3'-phosphate
  modified_base 5: mod_base = OTHER; note = 2'-O-methylcytidine-3'-phosphate
  modified_base 6: mod_base = OTHER; note = 2'-O-methylcytidine-3'-phosphate
  modified_base 7: mod_base = OTHER; note = 2'-fluorouridine-3'-phosphate
  modified_base 8: mod_base = OTHER; note = 2'-O-methylguanosine-3'-phosphate
  modified_base 9: mod_base = OTHER; note = 2'-fluoroguanosine-3'-phosphate
  modified_base 10: mod_base = OTHER; note = 2'-fluorouridine-3'-phosphate
  modified_base 11: mod_base = OTHER; note = 2'-fluoroguanosine-3'-phosphate
  modified_base 12: mod_base = OTHER; note = 2'-O-methylguanosine-3'-phosphate
  modified_base 13: mod_base = OTHER; note = 2'-O-methyladenosine-3'-phosphate
  modified_base 14: mod_base = OTHER; note = 2'-O-methyladenosine-3'-phosphate
  modified_base 15: mod_base = OTHER; note = 2'-O-methylguanosine-3'-phosphate
  modified_base 16: mod_base = OTHER; note = 2'-O-methyladenosine-3'-phosphate
  modified_base 17: mod_base = OTHER; note = 2'-O-methylcytidine-3'-phosphate
  modified_base 18: mod_base = OTHER; note = 2'-O-methyladenosine-3'-phosphate
  modified_base 19: mod_base = OTHER; note = 2'-O-methyluridine-3'-phosphate
  modified_base 20: mod_base = OTHER; note = 2'-O-methylguanosine-3'-phosphate
  modified_base 21: mod_base = OTHER; note = 2'-O-methyluridine-3'-phosphate N-[tris(N-acetylgalactosamine-alkyl)-amidodecanoyl)]-4-hydr oxyprolinol Hyp-(GalNAc-alkyl)3
agcccctggtggaagacatgt

SEQ ID NO: 392 - RNA, 21 nt, synthetic construct
  source 1..21: mol_type = other RNA; note = Description of Artificial Sequence: Synthetic oligonucleotide
  modified_base 1: mod_base = OTHER; note = 2'-O-methylcytidine-3'- phosphorothioate
  modified_base 2: mod_base = OTHER; note = 2'-O-methyluridine-3'-phosphorothioate
  modified_base 3: mod_base = OTHER; note = 2'-O-methylguanosine-3'-phosphate
  modified_base 4: mod_base = OTHER; note = 2'-O-methylguanosine-3'-phosphate
  modified_base 5: mod_base = OTHER; note = 2'-O-methyluridine-3'-phosphate
  modified_base 6: mod_base = OTHER; note = 2'-O-methylguanosine-3'-phosphate
  modified_base 7: mod_base = OTHER; note = 2'-fluoroguanosine-3'-phosphate
  modified_base 8: mod_base = OTHER; note = 2'-O-methyladenosine-3'-phosphate
  modified_base 9: mod_base = OTHER; note = 2'-fluoroadenosine-3'-phosphate
  modified_base 10: mod_base = OTHER; note = 2'-fluoroguanosine-3'-phosphate
  modified_base 11: mod_base = OTHER; note = 2'-fluoroadenosine-3'-phosphate
  modified_base 12: mod_base = OTHER; note = 2'-O-methylcytidine-3'-phosphate
  modified_base 13: mod_base = OTHER; note = 2'-O-methyladenosine-3'-phosphate
  modified_base 14: mod_base = OTHER; note = 2'-O-methyluridine-3'-phosphate
  modified_base 15: mod_base = OTHER; note = 2'-O-methylguanosine-3'-phosphate
  modified_base 16: mod_base = OTHER; note = 2'-O-methylcytidine-3'-phosphate
  modified_base 17: mod_base = OTHER; note = 2'-O-methyladenosine-3'-phosphate
  modified_base 18: mod_base = OTHER; note = 2'-O-methylguanosine-3'-phosphate
  modified_base 19: mod_base = OTHER; note = 2'-O-methylcytidine-3'-phosphate
  modified_base 20: mod_base = OTHER; note = 2'-O-methylguanosine-3'-phosphate
  modified_base 21: mod_base = OTHER; note = 2'-O-methyluridine-3'-phosphate N-[tris(N-acetylgalactosamine-alkyl)-amidodecanoyl)]-4-hydr oxyprolinol Hyp-(GalNAc-alkyl)3
ctggtggaagacatgcagcgt

SEQ ID NO: 393 - RNA, 21 nt, synthetic construct
  source 1..21: mol_type = other RNA; note = Description of Artificial Sequence: Synthetic oligonucleotide
  modified_base 1: mod_base = OTHER; note = 2'-O-methylguanosine-3'- phosphorothioate
  modified_base 2: mod_base = OTHER; note = 2'-O-methylguanosine-3'- phosphorothioate
  modified_base 3: mod_base = OTHER; note = 2'-O-methyladenosine-3'-phosphate
  modified_base 4: mod_base = OTHER; note = 2'-O-methyladenosine-3'-phosphate
  modified_base 5: mod_base = OTHER; note = 2'-O-methylguanosine-3'-phosphate
  modified_base 6: mod_base = OTHER; note = 2'-O-methyladenosine-3'-phosphate
  modified_base 7: mod_base = OTHER; note = 2'-fluorocytidine-3'-phosphate
  modified_base 8: mod_base = OTHER; note = 2'-O-methyladenosine-3'-phosphate
  modified_base 9: mod_base = OTHER; note = 2'-fluorouridine-3'-phosphate
  modified_base 10: mod_base = OTHER; note = 2'-fluoroguanosine-3'-phosphate
  modified_base 11: mod_base = OTHER; note = 2'-fluorocytidine-3'-phosphate
  modified_base 12: mod_base = OTHER; note = 2'-O-methyladenosine-3'-phosphate
  modified_base 13: mod_base = OTHER; note = 2'-O-methylguanosine-3'-phosphate
  modified_base 14: mod_base = OTHER; note = 2'-O-methylcytidine-3'-phosphate
  modified_base 15: mod_base = OTHER; note = 2'-O-methylguanosine-3'-phosphate
  modified_base 16: mod_base = OTHER; note = 2'-O-methylcytidine-3'-phosphate
  modified_base 17: mod_base = OTHER; note = 2'-O-methylcytidine-3'-phosphate
  modified_base 18: mod_base = OTHER; note = 2'-O-methyladenosine-3'-phosphate
  modified_base 19: mod_base = OTHER; note = 2'-O-methylguanosine-3'-phosphate
  modified_base 20: mod_base = OTHER; note = 2'-O-methyluridine-3'-phosphate
  modified_base 21: mod_base = OTHER; note = 2'-O-methyluridine-3'-phosphate N-[tris(N-acetylgalactosamine-alkyl)-amidodecanoyl)]-4-hydr oxyprolinol Hyp-(GalNAc-alkyl)3
ggaagacatgcagcgccagtt

SEQ ID NO: 394 - RNA, 21 nt, synthetic construct
  source 1..21: mol_type = other RNA; note = Description of Artificial Sequence: Synthetic oligonucleotide
  modified_base 1: mod_base = OTHER; note = 2'-O-methylguanosine-3'- phosphorothioate
  modified_base 2: mod_base = OTHER; note = 2'-O-methylcytidine-3'- phosphorothioate
  modified_base 3: mod_base = OTHER; note = 2'-O-methylcytidine-3'-phosphate
  modified_base 4: mod_base = OTHER; note = 2'-O-methylguanosine-3'-phosphate
  modified_base 5: mod_base = OTHER; note = 2'-O-methylguanosine-3'-phosphate
  modified_base 6: mod_base = OTHER; note = 2'-O-methylguanosine-3'-phosphate
  modified_base 7: mod_base = OTHER; note = 2'-fluorocytidine-3'-phosphate
  modified_base 8: mod_base = OTHER; note = 2'-O-methyluridine-3'-phosphate
  modified_base 9: mod_base = OTHER; note = 2'-fluoroguanosine-3'-phosphate
  modified_base 10: mod_base = OTHER; note = 2'-fluoroguanosine-3'-phosphate
  modified_base 11: mod_base = OTHER; note = 2'-fluorouridine-3'-phosphate
  modified_base 12: mod_base = OTHER; note = 2'-O-methylguanosine-3'-phosphate
  modified_base 13: mod_base = OTHER; note = 2'-O-methylguanosine-3'-phosphate
  modified_base 14: mod_base = OTHER; note = 2'-O-methyladenosine-3'-phosphate
  modified_base 15: mod_base = OTHER; note = 2'-O-methylguanosine-3'-phosphate
  modified_base 16: mod_base = OTHER; note = 2'-O-methyladenosine-3'-phosphate
  modified_base 17: mod_base = OTHER; note = 2'-O-methyladenosine-3'-phosphate
  modified_base 18: mod_base = OTHER; note = 2'-O-methylguanosine-3'-phosphate
  modified_base 19: mod_base = OTHER; note = 2'-O-methylguanosine-3'-phosphate
  modified_base 20: mod_base = OTHER; note = 2'-O-methyluridine-3'-phosphate
  modified_base 21: mod_base = OTHER; note = 2'-O-methyluridine-3'-phosphate N-[tris(N-acetylgalactosamine-alkyl)-amidodecanoyl)]-4-hydr oxyprolinol Hyp-(GalNAc-alkyl)3
gccgggctggtggagaaggtt

SEQ ID NO: 395 - RNA, 21 nt, synthetic construct
  source 1..21: mol_type = other RNA; note = Description of Artificial Sequence: Synthetic oligonucleotide
  modified_base 1: mod_base = OTHER; note = 2'-O-methylguanosine-3'- phosphorothioate
  modified_base 2: mod_base = OTHER; note = 2'-O-methylcytidine-3'- phosphorothioate
  modified_base 3: mod_base = OTHER; note = 2'-O-methyluridine-3'-phosphate
  modified_base 4: mod_base = OTHER; note = 2'-O-methylguanosine-3'-phosphate
  modified_base 5: mod_base = OTHER; note = 2'-O-methylguanosine-3'-phosphate
  modified_base 6: mod_base = OTHER; note = 2'-O-methyluridine-3'-phosphate
  modified_base 7: mod_base = OTHER; note = 2'-fluoroguanosine-3'-phosphate
  modified_base 8: mod_base = OTHER; note = 2'-O-methylguanosine-3'-phosphate
  modified_base 9: mod_base = OTHER; note = 2'-fluoroadenosine-3'-phosphate
  modified_base 10: mod_base = OTHER; note = 2'-fluoroguanosine-3'-phosphate
  modified_base 11: mod_base = OTHER; note = 2'-fluoroadenosine-3'-phosphate
  modified_base 12: mod_base = OTHER; note = 2'-O-methyladenosine-3'-phosphate
  modified_base 13: mod_base = OTHER; note = 2'-O-methylguanosine-3'-phosphate
  modified_base 14: mod_base = OTHER; note = 2'-O-methylguanosine-3'-phosphate
  modified_base 15: mod_base = OTHER; note = 2'-O-methyluridine-3'-phosphate
  modified_base 16: mod_base = OTHER; note = 2'-O-methylguanosine-3'-phosphate
  modified_base 17: mod_base = OTHER; note = 2'-O-methylcytidine-3'-phosphate
  modified_base 18: mod_base = OTHER; note = 2'-O-methyladenosine-3'-phosphate
  modified_base 19: mod_base = OTHER; note = 2'-O-methylguanosine-3'-phosphate
  modified_base 20: mod_base = OTHER; note = 2'-O-methylguanosine-3'-phosphate
  modified_base 21: mod_base = OTHER; note = 2'-O-methyluridine-3'-phosphate N-[tris(N-acetylgalactosamine-alkyl)-amidodecanoyl)]-4-hydr oxyprolinol Hyp-(GalNAc-alkyl)3
gctggtggagaaggtgcaggt

SEQ ID NO: 396 - RNA, 21 nt, synthetic construct
  source 1..21: mol_type = other RNA; note = Description of Artificial Sequence: Synthetic oligonucleotide
  modified_base 1: mod_base = OTHER; note = 2'-O-methyladenosine-3'- phosphorothioate
  modified_base 2: mod_base = OTHER; note = 2'-O-methylcytidine-3'- phosphorothioate
  modified_base 3: mod_base = OTHER; note = 2'-O-methylcytidine-3'-phosphate
  modified_base 4: mod_base = OTHER; note = 2'-O-methyladenosine-3'-phosphate
  modified_base 5: mod_base = OTHER; note = 2'-O-methylguanosine-3'-phosphate
  modified_base 6: mod_base = OTHER; note = 2'-O-methylcytidine-3'-phosphate
  modified_base 7: mod_base = OTHER; note = 2'-fluoroguanosine-3'-phosphate
  modified_base 8: mod_base = OTHER; note = 2'-O-methylcytidine-3'-phosphate
  modified_base 9: mod_base = OTHER; note = 2'-fluorocytidine-3'-phosphate
  modified_base 10: mod_base = OTHER; note = 2'-fluoroguanosine-3'-phosphate
  modified_base 11: mod_base = OTHER; note = 2'-fluorocytidine-3'-phosphate
  modified_base 12: mod_base = OTHER; note = 2'-O-methylcytidine-3'-phosphate
  modified_base 13: mod_base = OTHER; note = 2'-O-methylcytidine-3'-phosphate
  modified_base 14: mod_base = OTHER; note = 2'-O-methylcytidine-3'-phosphate
  modified_base 15: mod_base = OTHER; note = 2'-O-methyluridine-3'-phosphate
  modified_base 16: mod_base = OTHER; note = 2'-O-methylguanosine-3'-phosphate
  modified_base 17: mod_base = OTHER; note = 2'-O-methyluridine-3'-phosphate
  modified_base 18: mod_base = OTHER; note = 2'-O-methylguanosine-3'-phosphate
  modified_base 19: mod_base = OTHER; note = 2'-O-methylcytidine-3'-phosphate
  modified_base 20: mod_base = OTHER; note = 2'-O-methylcytidine-3'-phosphate
  modified_base 21: mod_base = OTHER; note = 2'-O-methyluridine-3'-phosphate N-[tris(N-acetylgalactosamine-alkyl)-amidodecanoyl)]-4-hydr oxyprolinol Hyp-(GalNAc-alkyl)3
accagcgccgcccctgtgcct

SEQ ID NO: 397 - RNA, 21 nt, synthetic construct
  source 1..21: mol_type = other RNA; note = Description of Artificial Sequence: Synthetic oligonucleotide
  modified_base 1: mod_base = OTHER; note = 2'-O-methylguanosine-3'- phosphorothioate
  modified_base 2: mod_base = OTHER; note = 2'-O-methylcytidine-3'- phosphorothioate
  modified_base 3: mod_base = OTHER; note = 2'-O-methylcytidine-3'-phosphate
  modified_base 4: mod_base = OTHER; note = 2'-O-methylcytidine-3'-phosphate
  modified_base 5: mod_base = OTHER; note = 2'-O-methylcytidine-3'-phosphate
  modified_base 6: mod_base = OTHER; note = 2'-O-methyluridine-3'-phosphate
  modified_base 7: mod_base = OTHER; note = 2'-fluoroguanosine-3'-phosphate
  modified_base 8: mod_base = OTHER; note = 2'-O-methyluridine-3'-phosphate
  modified_base 9: mod_base = OTHER; note = 2'-fluoroguanosine-3'-phosphate
  modified_base 10: mod_base = OTHER; note = 2'-fluorocytidine-3'-phosphate
  modified_base 11: mod_base = OTHER; note = 2'-fluorocytidine-3'-phosphate
  modified_base 12: mod_base = OTHER; note = 2'-O-methylcytidine-3'-phosphate
  modified_base 13: mod_base = OTHER; note = 2'-O-methyladenosine-3'-phosphate
  modified_base 14: mod_base = OTHER; note = 2'-O-methylguanosine-3'-phosphate
  modified_base 15: mod_base = OTHER; note = 2'-O-methylcytidine-3'-phosphate
  modified_base 16: mod_base = OTHER; note = 2'-O-methylguanosine-3'-phosphate
  modified_base 17: mod_base = OTHER; note = 2'-O-methyladenosine-3'-phosphate
  modified_base 18: mod_base = OTHER; note = 2'-O-methylcytidine-3'-phosphate
  modified_base 19: mod_base = OTHER; note = 2'-O-methyladenosine-3'-phosphate
  modified_base 20: mod_base = OTHER; note = 2'-O-methyladenosine-3'-phosphate
  modified_base 21: mod_base = OTHER; note = 2'-O-methyluridine-3'-phosphate N-[tris(N-acetylgalactosamine-alkyl)-amidodecanoyl)]-4-hydr oxyprolinol Hyp-(GalNAc-alkyl)3
gcccctgtgcccagcgacaat

SEQ ID NO: 398 - RNA, 21 nt, synthetic construct
  source 1..21: mol_type = other RNA; note = Description of Artificial Sequence: Synthetic oligonucleotide
  modified_base 1: mod_base = OTHER; note = 2'-O-methyluridine-3'-phosphorothioate
  modified_base 2: mod_base = OTHER; note = 2'-O-methylguanosine-3'- phosphorothioate
  modified_base 3: mod_base = OTHER; note = 2'-O-methyluridine-3'-phosphate
  modified_base 4: mod_base = OTHER; note = 2'-O-methylguanosine-3'-phosphate
  modified_base 5: mod_base = OTHER; note = 2'-O-methylcytidine-3'-phosphate
  modified_base 6: mod_base = OTHER; note = 2'-O-methylcytidine-3'-phosphate
  modified_base 7: mod_base = OTHER; note = 2'-fluorocytidine-3'-phosphate
  modified_base 8: mod_base = OTHER; note = 2'-O-methyladenosine-3'-phosphate
  modified_base 9: mod_base = OTHER; note = 2'-fluoroguanosine-3'-phosphate
  modified_base 10: mod_base = OTHER; note = 2'-fluorocytidine-3'-phosphate
  modified_base 11: mod_base = OTHER; note = 2'-fluoroguanosine-3'-phosphate
  modified_base 12: mod_base = OTHER; note = 2'-O-methyladenosine-3'-phosphate
  modified_base 13: mod_base = OTHER; note = 2'-O-methylcytidine-3'-phosphate
  modified_base 14: mod_base = OTHER; note = 2'-O-methyladenosine-3'-phosphate
  modified_base 15: mod_base = OTHER; note = 2'-O-methyladenosine-3'-phosphate
  modified_base 16: mod_base = OTHER; note = 2'-O-methyluridine-3'-phosphate
  modified_base 17: mod_base = OTHER; note = 2'-O-methylcytidine-3'-phosphate
  modified_base 18: mod_base = OTHER; note = 2'-O-methyladenosine-3'-phosphate
  modified_base 19: mod_base = OTHER; note = 2'-O-methylcytidine-3'-phosphate
  modified_base 20: mod_base = OTHER; note = 2'-O-methyluridine-3'-phosphate
  modified_base 21: mod_base = OTHER; note = 2'-O-methyluridine-3'-phosphate N-[tris(N-acetylgalactosamine-alkyl)-amidodecanoyl)]-4-hydr oxyprolinol Hyp-(GalNAc-alkyl)3
tgtgcccagcgacaatcactt

SEQ ID NO: 399 - RNA, 21 nt, synthetic construct
  source 1..21: mol_type = other RNA; note = Description of Artificial Sequence: Synthetic oligonucleotide
  modified_base 1: mod_base = OTHER; note = 2'-O-methylcytidine-3'- phosphorothioate
  modified_base 2: mod_base = OTHER; note = 2'-O-methyladenosine-3'- phosphorothioate
  modified_base 3: mod_base = OTHER; note = 2'-O-methylguanosine-3'-phosphate
  modified_base 4: mod_base = OTHER; note = 2'-O-methylcytidine-3'-phosphate
  modified_base 5: mod_base = OTHER; note = 2'-O-methylguanosine-3'-phosphate
  modified_base 6: mod_base = OTHER; note = 2'-O-methyladenosine-3'-phosphate
  modified_base 7: mod_base = OTHER; note = 2'-fluorocytidine-3'-phosphate
  modified_base 8: mod_base = OTHER; note = 2'-O-methyladenosine-3'-phosphate
  modified_base 9: mod_base = OTHER; note = 2'-fluoroadenosine-3'-phosphate
  modified_base 10: mod_base = OTHER; note = 2'-fluorouridine-3'-phosphate
  modified_base 11: mod_base = OTHER; note = 2'-fluorocytidine-3'-phosphate
  modified_base 12: mod_base = OTHER; note = 2'-O-methyladenosine-3'-phosphate
  modified_base 13: mod_base = OTHER; note = 2'-O-methylcytidine-3'-phosphate
  modified_base 14: mod_base = OTHER; note = 2'-O-methyluridine-3'-phosphate
  modified_base 15: mod_base = OTHER; note = 2'-O-methylguanosine-3'-phosphate
  modified_base 16: mod_base = OTHER; note = 2'-O-methyladenosine-3'-phosphate
  modified_base 17: mod_base = OTHER; note = 2'-O-methyladenosine-3'-phosphate
  modified_base 18: mod_base = OTHER; note = 2'-O-methylcytidine-3'-phosphate
  modified_base 19: mod_base = OTHER; note = 2'-O-methylguanosine-3'-phosphate
  modified_base 20: mod_base = OTHER; note = 2'-O-methylcytidine-3'-phosphate
  modified_base 21: mod_base = OTHER; note = 2'-O-methyluridine-3'-phosphate N-[tris(N-acetylgalactosamine-alkyl)-amidodecanoyl)]-4-hydr oxyprolinol Hyp-(GalNAc-alkyl)3
cagcgacaatcactgaacgct

SEQ ID NO: 400 - RNA, 21 nt, synthetic construct
  source 1..21: mol_type = other RNA; note = Description of Artificial Sequence: Synthetic oligonucleotide
  modified_base 1: mod_base = OTHER; note = 2'-O-methylcytidine-3'- phosphorothioate
  modified_base 2: mod_base = OTHER; note = 2'-O-methyladenosine-3'- phosphorothioate
  modified_base 3: mod_base = OTHER; note = 2'-O-methyladenosine-3'-phosphate
  modified_base 4: mod_base = OTHER; note = 2'-O-methyluridine-3'-phosphate
  modified_base 5: mod_base = OTHER; note = 2'-O-methylcytidine-3'-phosphate
  modified_base 6: mod_base = OTHER; note = 2'-O-methyladenosine-3'-phosphate
  modified_base 7: mod_base = OTHER; note = 2'-fluorocytidine-3'-phosphate
  modified_base 8: mod_base = OTHER; note = 2'-O-methyluridine-3'-phosphate
  modified_base 9: mod_base = OTHER; note = 2'-fluoroguanosine-3'-phosphate
  modified_base 10: mod_base = OTHER; note = 2'-fluoroadenosine-3'-phosphate
  modified_base 11: mod_base = OTHER; note = 2'-fluoroadenosine-3'-phosphate
  modified_base 12: mod_base = OTHER; note = 2'-O-methylcytidine-3'-phosphate
  modified_base 13: mod_base = OTHER; note = 2'-O-methylguanosine-3'-phosphate
  modified_base 14: mod_base = OTHER; note = 2'-O-methylcytidine-3'-phosphate
  modified_base 15: mod_base = OTHER; note = 2'-O-methylcytidine-3'-phosphate
  modified_base 16: mod_base = OTHER; note = 2'-O-methylguanosine-3'-phosphate
  modified_base 17: mod_base = OTHER; note = 2'-O-methyladenosine-3'-phosphate
  modified_base 18: mod_base = OTHER; note = 2'-O-methyladenosine-3'-phosphate
  modified_base 19: mod_base = OTHER; note = 2'-O-methylguanosine-3'-phosphate
  modified_base 20: mod_base = OTHER; note = 2'-O-methylcytidine-3'-phosphate
  modified_base 21: mod_base = OTHER; note = 2'-O-methyluridine-3'-phosphate N-[tris(N-acetylgalactosamine-alkyl)-amidodecanoyl)]-4-hydr oxyprolinol Hyp-(GalNAc-alkyl)3
caatcactgaacgccgaagct

SEQ ID NO: 401 - RNA, 21 nt, synthetic construct
  source 1..21: mol_type = other RNA; note = Description of Artificial Sequence: Synthetic oligonucleotide
  modified_base 1: mod_base = OTHER; note = 2'-O-methyladenosine-3'- phosphorothioate
  modified_base 2: mod_base = OTHER; note = 2'-O-methylcytidine-3'- phosphorothioate
  modified_base 3: mod_base = OTHER; note = 2'-O-methyluridine-3'-phosphate
  modified_base 4: mod_base = OTHER; note = 2'-O-methylguanosine-3'-phosphate
  modified_base 5: mod_base = OTHER; note = 2'-O-methyladenosine-3'-phosphate
  modified_base 6: mod_base = OTHER; note = 2'-O-methyladenosine-3'-phosphate
  modified_base 7: mod_base = OTHER; note = 2'-fluorocytidine-3'-phosphate
  modified_base 8: mod_base = OTHER; note = 2'-O-methylguanosine-3'-phosphate
  modified_base 9: mod_base = OTHER; note = 2'-fluorocytidine-3'-phosphate
  modified_base 10: mod_base = OTHER; note = 2'-fluorocytidine-3'-phosphate
  modified_base 11: mod_base = OTHER; note = 2'-fluoroguanosine-3'-phosphate
  modified_base 12: mod_base = OTHER; note = 2'-O-methyladenosine-3'-phosphate
  modified_base 13: mod_base = OTHER; note = 2'-O-methyladenosine-3'-phosphate
  modified_base 14: mod_base = OTHER; note = 2'-O-methylguanosine-3'-phosphate
  modified_base 15: mod_base = OTHER; note = 2'-O-methylcytidine-3'-phosphate
  modified_base 16: mod_base = OTHER; note = 2'-O-methylcytidine-3'-phosphate
  modified_base 17: mod_base = OTHER; note = 2'-O-methyluridine-3'-phosphate
  modified_base 18: mod_base = OTHER; note = 2'-O-methylguanosine-3'-phosphate
  modified_base 19: mod_base = OTHER; note = 2'-O-methylcytidine-3'-phosphate
  modified_base 20: mod_base = OTHER; note = 2'-O-methyladenosine-3'-phosphate
  modified_base 21: mod_base = OTHER; note = 2'-O-methyluridine-3'-phosphate N-[tris(N-acetylgalactosamine-alkyl)-amidodecanoyl)]-4-hydr oxyprolinol Hyp-(GalNAc-alkyl)3
actgaacgccgaagcctgcat

SEQ ID NO: 402 - RNA, 21 nt, synthetic construct
  source 1..21: mol_type = other RNA; note = Description of Artificial Sequence: Synthetic oligonucleotide
  modified_base 1: mod_base = OTHER; note = 2'-O-methyladenosine-3'- phosphorothioate
  modified_base 2: mod_base = OTHER; note = 2'-O-methylcytidine-3'- phosphorothioate
  modified_base 3: mod_base = OTHER; note = 2'-O-methylguanosine-3'-phosphate
  modified_base 4: mod_base = OTHER; note = 2'-O-methylcytidine-3'-phosphate
  modified_base 5: mod_base = OTHER; note = 2'-O-methylcytidine-3'-phosphate
  modified_base 6: mod_base = OTHER; note = 2'-O-methylguanosine-3'-phosphate
  modified_base 7: mod_base = OTHER; note = 2'-fluoroadenosine-3'-phosphate
  modified_base 8: mod_base = OTHER; note = 2'-O-methyladenosine-3'-phosphate
  modified_base 9: mod_base = OTHER; note = 2'-fluoroguanosine-3'-phosphate
  modified_base 10: mod_base = OTHER; note = 2'-fluorocytidine-3'-phosphate
  modified_base 11: mod_base = OTHER; note = 2'-fluorocytidine-3'-phosphate
  modified_base 12: mod_base = OTHER; note = 2'-O-methyluridine-3'-phosphate
  modified_base 13: mod_base = OTHER; note = 2'-O-methylguanosine-3'-phosphate
  modified_base 14: mod_base = OTHER; note = 2'-O-methylcytidine-3'-phosphate
  modified_base 15: mod_base = OTHER; note = 2'-O-methyladenosine-3'-phosphate
  modified_base 16: mod_base = OTHER; note = 2'-O-methylguanosine-3'-phosphate
  modified_base 17: mod_base = OTHER; note = 2'-O-methylcytidine-3'-phosphate
  modified_base 18: mod_base = OTHER; note = 2'-O-methylcytidine-3'-phosphate
  modified_base 19: mod_base = OTHER; note = 2'-O-methyladenosine-3'-phosphate
  modified_base 20: mod_base = OTHER; note = 2'-O-methyluridine-3'-phosphate
  modified_base 21: mod_base = OTHER; note = 2'-O-methyluridine-3'-phosphate N-[tris(N-acetylgalactosamine-alkyl)-amidodecanoyl)]-4-hydr oxyprolinol Hyp-(GalNAc-alkyl)3
acgccgaagcctgcagccatt

SEQ ID NO: 403 - RNA, 21 nt, synthetic construct
  source 1..21: mol_type = other RNA; note = Description of Artificial Sequence: Synthetic oligonucleotide
  modified_base 1: mod_base = OTHER; note = 2'-O-methylguanosine-3'- phosphorothioate
  modified_base 2: mod_base = OTHER; note = 2'-O-methyladenosine-3'- phosphorothioate
  modified_base 3: mod_base = OTHER; note = 2'-O-methyladenosine-3'-phosphate
  modified_base 4: mod_base = OTHER; note = 2'-O-methylguanosine-3'-phosphate
  modified_base 5: mod_base = OTHER; note = 2'-O-methylcytidine-3'-phosphate
  modified_base 6: mod_base = OTHER; note = 2'-O-methylcytidine-3'-phosphate
  modified_base 7: mod_base = OTHER; note = 2'-fluorouridine-3'-phosphate
  modified_base 8: mod_base = OTHER; note = 2'-O-methylguanosine-3'-phosphate
  modified_base 9: mod_base = OTHER; note = 2'-fluorocytidine-3'-phosphate
  modified_base 10: mod_base = OTHER; note = 2'-fluoroadenosine-3'-phosphate
  modified_base 11: mod_base = OTHER; note = 2'-fluoroguanosine-3'-phosphate
  modified_base 12: mod_base = OTHER; note = 2'-O-methylcytidine-3'-phosphate
  modified_base 13: mod_base = OTHER; note = 2'-O-methylcytidine-3'-phosphate
  modified_base 14: mod_base = OTHER; note = 2'-O-methyladenosine-3'-phosphate
  modified_base 15: mod_base = OTHER; note = 2'-O-methyluridine-3'-phosphate
  modified_base 16: mod_base = OTHER; note = 2'-O-methylguanosine-3'-phosphate
  modified_base 17: mod_base = OTHER; note = 2'-O-methylcytidine-3'-phosphate
  modified_base 18: mod_base = OTHER; note = 2'-O-methylguanosine-3'-phosphate
  modified_base 19: mod_base = OTHER; note = 2'-O-methyladenosine-3'-phosphate
  modified_base 20: mod_base = OTHER; note = 2'-O-methylcytidine-3'-phosphate
  modified_base 21: mod_base = OTHER; note = 2'-O-methyluridine-3'-phosphate N-[tris(N-acetylgalactosamine-alkyl)-amidodecanoyl)]-4-hydr oxyprolinol Hyp-(GalNAc-alkyl)3
gaagcctgcagccatgcgact

SEQ ID NO: 404 - RNA, 21 nt, synthetic construct
  source 1..21: mol_type = other RNA; note = Description of Artificial Sequence: Synthetic oligonucleotide
  modified_base 1: mod_base = OTHER; note = 2'-O-methyluridine-3'-phosphorothioate
  modified_base 2: mod_base = OTHER; note = 2'-O-methylguanosine-3'- phosphorothioate
  modified_base 3: mod_base = OTHER; note = 2'-O-methylcytidine-3'-phosphate
  modified_base 4: mod_base = OTHER; note = 2'-O-methyladenosine-3'-phosphate
  modified_base 5: mod_base = OTHER; note = 2'-O-methylguanosine-3'-phosphate
  modified_base 6: mod_base = OTHER; note = 2'-O-methylcytidine-3'-phosphate
  modified_base 7: mod_base = OTHER; note = 2'-fluorocytidine-3'-phosphate
  modified_base 8: mod_base = OTHER; note = 2'-O-methyladenosine-3'-phosphate
  modified_base 9: mod_base = OTHER; note = 2'-fluorouridine-3'-phosphate
  modified_base 10: mod_base = OTHER; note = 2'-fluoroguanosine-3'-phosphate
  modified_base 11: mod_base = OTHER; note = 2'-fluorocytidine-3'-phosphate
  modified_base 12: mod_base = OTHER; note = 2'-O-methylguanosine-3'-phosphate
  modified_base 13: mod_base = OTHER; note = 2'-O-methyladenosine-3'-phosphate
  modified_base 14: mod_base = OTHER; note = 2'-O-methylcytidine-3'-phosphate
  modified_base 15: mod_base = OTHER; note = 2'-O-methylcytidine-3'-phosphate
  modified_base 16: mod_base = OTHER; note = 2'-O-methylcytidine-3'-phosphate
  modified_base 17: mod_base = OTHER; note = 2'-O-methylcytidine-3'-phosphate
  modified_base 18: mod_base = OTHER; note = 2'-O-methyladenosine-3'-phosphate
  modified_base 19: mod_base = OTHER; note = 2'-O-methylcytidine-3'-phosphate
  modified_base 20: mod_base = OTHER; note = 2'-O-methylguanosine-3'-phosphate
  modified_base 21: mod_base = OTHER; note = 2'-O-methyluridine-3'-phosphate N-[tris(N-acetylgalactosamine-alkyl)-amidodecanoyl)]-4-hydr oxyprolinol Hyp-(GalNAc-alkyl)3
tgcagccatgcgaccccacgt

SEQ ID NO: 405 - RNA, 21 nt, synthetic construct
  source 1..21: mol_type = other RNA; note = Description of Artificial Sequence: Synthetic oligonucleotide
  modified_base 1: mod_base = OTHER; note = 2'-O-methylguanosine-3'- phosphorothioate
  modified_base 2: mod_base = OTHER; note = 2'-O-methylcytidine-3'- phosphorothioate
  modified_base 3: mod_base = OTHER; note = 2'-O-methylguanosine-3'-phosphate
  modified_base 4: mod_base = OTHER; note = 2'-O-methyladenosine-3'-phosphate
  modified_base 5: mod_base = OTHER; note = 2'-O-methylcytidine-3'-phosphate
  modified_base 6: mod_base = OTHER; note = 2'-O-methylcytidine-3'-phosphate
  modified_base 7: mod_base = OTHER; note = 2'-fluorocytidine-3'-phosphate
  modified_base 8: mod_base = OTHER; note = 2'-O-methylcytidine-3'-phosphate
  modified_base 9: mod_base = OTHER; note = 2'-fluoroadenosine-3'-phosphate
  modified_base 10: mod_base = OTHER; note = 2'-fluorocytidine-3'-phosphate
  modified_base 11: mod_base = OTHER; note = 2'-fluoroguanosine-3'-phosphate
  modified_base 12: mod_base = OTHER; note = 2'-O-methylcytidine-3'-phosphate
  modified_base 13: mod_base = OTHER; note = 2'-O-methylcytidine-3'-phosphate
  modified_base 14: mod_base = OTHER; note = 2'-O-methyladenosine-3'-phosphate
  modified_base 15: mod_base = OTHER; note = 2'-O-methylcytidine-3'-phosphate
  modified_base 16: mod_base = OTHER; note = 2'-O-methylcytidine-3'-phosphate
  modified_base 17: mod_base = OTHER; note = 2'-O-methylcytidine-3'-phosphate
  modified_base 18: mod_base = OTHER; note = 2'-O-methylcytidine-3'-phosphate
  modified_base 19: mod_base = OTHER; note = 2'-O-methylguanosine-3'-phosphate
  modified_base 20: mod_base = OTHER; note = 2'-O-methyluridine-3'-phosphate
  modified_base 21: mod_base = OTHER; note = 2'-O-methyluridine-3'-phosphate N-[tris(N-acetylgalactosamine-alkyl)-amidodecanoyl)]-4-hydr oxyprolinol Hyp-(GalNAc-alkyl)3
gcgaccccacgccaccccgtt

SEQ ID NO: 406 - RNA, 21 nt, synthetic construct
  source 1..21: mol_type = other RNA; note = Description of Artificial Sequence: Synthetic oligonucleotide
  modified_base 1: mod_base = OTHER; note = 2'-O-methylcytidine-3'- phosphorothioate
  modified_base 2: mod_base = OTHER; note = 2'-O-methylcytidine-3'- phosphorothioate
  modified_base 3: mod_base = OTHER; note = 2'-O-methylcytidine-3'-phosphate
  modified_base 4: mod_base = OTHER; note = 2'-O-methyladenosine-3'-phosphate
  modified_base 5: mod_base = OTHER; note = 2'-O-methylcytidine-3'-phosphate
  modified_base 6: mod_base = OTHER; note = 2'-O-methylguanosine-3'-phosphate
  modified_base 7: mod_base = OTHER; note = 2'-fluorocytidine-3'-phosphate
  modified_base 8: mod_base = OTHER; note = 2'-O-methylcytidine-3'-phosphate
  modified_base 9: mod_base = OTHER; note = 2'-fluoroadenosine-3'-phosphate
  modified_base 10: mod_base = OTHER; note = 2'-fluorocytidine-3'-phosphate
  modified_base 11: mod_base = OTHER; note = 2'-fluorocytidine-3'-phosphate
  modified_base 12: mod_base = OTHER; note = 2'-O-methylcytidine-3'-phosphate
  modified_base 13: mod_base = OTHER; note = 2'-O-methylcytidine-3'-phosphate
  modified_base 14: mod_base = OTHER; note = 2'-O-methylguanosine-3'-phosphate
  modified_base 15: mod_base = OTHER; note = 2'-O-methyluridine-3'-phosphate
  modified_base 16: mod_base = OTHER; note = 2'-O-methylguanosine-3'-phosphate
  modified_base 17: mod_base = OTHER; note = 2'-O-methylcytidine-3'-phosphate
  modified_base 18: mod_base = OTHER; note = 2'-O-methylcytidine-3'-phosphate
  modified_base 19: mod_base = OTHER; note = 2'-O-methyluridine-3'-phosphate
  modified_base 20: mod_base = OTHER; note = 2'-O-methylcytidine-3'-phosphate
  modified_base 21: mod_base = OTHER; note = 2'-O-methyluridine-3'-phosphate N-[tris(N-acetylgalactosamine-alkyl)-amidodecanoyl)]-4-hydr oxyprolinol Hyp-(GalNAc-alkyl)3
cccacgccaccccgtgcctct

SEQ ID NO: 407 - RNA, 21 nt, synthetic construct
  source 1..21: mol_type = other RNA; note = Description of Artificial Sequence: Synthetic oligonucleotide
  modified_base 1: mod_base = OTHER; note = 2'-O-methylcytidine-3'- phosphorothioate
  modified_base 2: mod_base = OTHER; note = 2'-O-methylcytidine-3'- phosphorothioate
  modified_base 3: mod_base = OTHER; note = 2'-O-methyladenosine-3'-phosphate
  modified_base 4: mod_base = OTHER; note = 2'-O-methylcytidine-3'-phosphate
  modified_base 5: mod_base = OTHER; note = 2'-O-methylcytidine-3'-phosphate
  modified_base 6: mod_base = OTHER; note = 2'-O-methylcytidine-3'-phosphate
  modified_base 7: mod_base = OTHER; note = 2'-fluorocytidine-3'-phosphate
  modified_base 8: mod_base = OTHER; note = 2'-O-methylguanosine-3'-phosphate
  modified_base 9: mod_base = OTHER; note = 2'-fluorouridine-3'-phosphate
  modified_base 10: mod_base = OTHER; note = 2'-fluoroguanosine-3'-phosphate
  modified_base 11: mod_base = OTHER; note = 2'-fluorocytidine-3'-phosphate
  modified_base 12: mod_base = OTHER; note = 2'-O-methylcytidine-3'-phosphate
  modified_base 13: mod_base = OTHER; note = 2'-O-methyluridine-3'-phosphate
  modified_base 14: mod_base = OTHER; note = 2'-O-methylcytidine-3'-phosphate
  modified_base 15: mod_base = OTHER; note = 2'-O-methylcytidine-3'-phosphate
  modified_base 16: mod_base = OTHER; note = 2'-O-methyluridine-3'-phosphate
  modified_base 17: mod_base = OTHER; note = 2'-O-methylguanosine-3'-phosphate
  modified_base 18: mod_base = OTHER; note = 2'-O-methylcytidine-3'-phosphate
  modified_base 19: mod_base = OTHER; note = 2'-O-methylcytidine-3'-phosphate
  modified_base 20: mod_base = OTHER; note = 2'-O-methyluridine-3'-phosphate
  modified_base 21: mod_base = OTHER; note = 2'-O-methyluridine-3'-phosphate N-[tris(N-acetylgalactosamine-alkyl)-amidodecanoyl)]-4-hydr oxyprolinol Hyp-(GalNAc-alkyl)3
ccaccccgtgcctcctgcctt

SEQ ID NO: 408 - RNA, 21 nt, synthetic construct
  source 1..21: mol_type = other RNA; note = Description of Artificial Sequence: Synthetic oligonucleotide
  modified_base 1: mod_base = OTHER; note = 2'-O-methylcytidine-3'- phosphorothioate
  modified_base 2: mod_base = OTHER; note = 2'-O-methylguanosine-3'- phosphorothioate
  modified_base 3: mod_base = OTHER; note = 2'-O-methyluridine-3'-phosphate
  modified_base 4: mod_base = OTHER; note = 2'-O-methylguanosine-3'-phosphate
  modified_base 5: mod_base = OTHER; note = 2'-O-methylcytidine-3'-phosphate
  modified_base 6: mod_base = OTHER; note = 2'-O-methylcytidine-3'-phosphate
  modified_base 7: mod_base = OTHER; note = 2'-fluorouridine-3'-phosphate
  modified_base 8: mod_base = OTHER; note = 2'-O-methylcytidine-3'-phosphate
  modified_base 9: mod_base = OTHER; note = 2'-fluorocytidine-3'-phosphate
  modified_base 10: mod_base = OTHER; note = 2'-fluorouridine-3'-phosphate
  modified_base 11: mod_base = OTHER; note = 2'-fluoroguanosine-3'-phosphate
  modified_base 12: mod_base = OTHER; note = 2'-O-methylcytidine-3'-phosphate
  modified_base 13: mod_base = OTHER; note = 2'-O-methylcytidine-3'-phosphate
  modified_base 14: mod_base = OTHER; note = 2'-O-methyluridine-3'-phosphate
  modified_base 15: mod_base = OTHER; note = 2'-O-methylcytidine-3'-phosphate
  modified_base 16: mod_base = OTHER; note = 2'-O-methylcytidine-3'-phosphate
  modified_base 17: mod_base = OTHER; note = 2'-O-methylguanosine-3'-phosphate
  modified_base 18: mod_base = OTHER; note = 2'-O-methylcytidine-3'-phosphate
  modified_base 19: mod_base = OTHER; note = 2'-O-methylguanosine-3'-phosphate
  modified_base 20: mod_base = OTHER; note = 2'-O-methylcytidine-3'-phosphate
  modified_base 21: mod_base = OTHER; note = 2'-O-methyluridine-3'-phosphate N-[tris(N-acetylgalactosamine-alkyl)-amidodecanoyl)]-4-hydr oxyprolinol Hyp-(GalNAc-alkyl)3
cgtgcctcctgcctccgcgct

SEQ ID NO: 409 - RNA, 21 nt, synthetic construct
  source 1..21: mol_type = other RNA; note = Description of Artificial Sequence: Synthetic oligonucleotide
  modified_base 1: mod_base = OTHER; note = 2'-O-methylcytidine-3'- phosphorothioate
  modified_base 2: mod_base = OTHER; note = 2'-O-methyluridine-3'-phosphorothioate
  modified_base 3: mod_base = OTHER; note = 2'-O-methylcytidine-3'-phosphate
  modified_base 4: mod_base = OTHER; note = 2'-O-methylcytidine-3'-phosphate
  modified_base 5: mod_base = OTHER; note = 2'-O-methyluridine-3'-phosphate
  modified_base 6: mod_base = OTHER; note = 2'-O-methylguanosine-3'-phosphate
  modified_base 7: mod_base = OTHER; note = 2'-fluorocytidine-3'-phosphate
  modified_base 8: mod_base = OTHER; note = 2'-O-methylcytidine-3'-phosphate
  modified_base 9: mod_base = OTHER; note = 2'-fluorouridine-3'-phosphate
  modified_base 10: mod_base = OTHER; note = 2'-fluorocytidine-3'-phosphate
  modified_base 11: mod_base = OTHER; note = 2'-fluorocytidine-3'-phosphate
  modified_base 12: mod_base = OTHER; note = 2'-O-methylguanosine-3'-phosphate
  modified_base 13: mod_base = OTHER; note = 2'-O-methylcytidine-3'-phosphate
  modified_base 14: mod_base = OTHER; note = 2'-O-methylguanosine-3'-phosphate
  modified_base 15: mod_base = OTHER; note = 2'-O-methylcytidine-3'-phosphate
  modified_base 16: mod_base = OTHER; note = 2'-O-methyladenosine-3'-phosphate
  modified_base 17: mod_base = OTHER; note = 2'-O-methylguanosine-3'-phosphate
  modified_base 18: mod_base = OTHER; note = 2'-O-methylcytidine-3'-phosphate
  modified_base 19: mod_base = OTHER; note = 2'-O-methylcytidine-3'-phosphate
  modified_base 20: mod_base = OTHER; note = 2'-O-methyluridine-3'-phosphate
  modified_base 21: mod_base = OTHER; note = 2'-O-methyluridine-3'-phosphate N-[tris(N-acetylgalactosamine-alkyl)-amidodecanoyl)]-4-hydr oxyprolinol Hyp-(GalNAc-alkyl)3
ctcctgcctccgcgcagcctt

SEQ ID NO: 410 - RNA, 21 nt, synthetic construct
  source 1..21: mol_type = other RNA; note = Description of Artificial Sequence: Synthetic oligonucleotide
  modified_base 1: mod_base = OTHER; note = 2'-O-methylguanosine-3'- phosphorothioate
  modified_base 2: mod_base = OTHER; note = 2'-O-methylcytidine-3'- phosphorothioate
  modified_base 3: mod_base = OTHER; note = 2'-O-methylcytidine-3'-phosphate
  modified_base 4: mod_base = OTHER; note = 2'-O-methyluridine-3'-phosphate
  modified_base 5: mod_base = OTHER; note = 2'-O-methylcytidine-3'-phosphate
  modified_base 6: mod_base = OTHER; note = 2'-O-methylcytidine-3'-phosphate
  modified_base 7: mod_base = OTHER; note = 2'-fluoroguanosine-3'-phosphate
  modified_base 8: mod_base = OTHER; note = 2'-O-methylcytidine-3'-phosphate
  modified_base 9: mod_base = OTHER; note = 2'-fluoroguanosine-3'-phosphate
  modified_base 10: mod_base = OTHER; note = 2'-fluorocytidine-3'-phosphate
  modified_base 11: mod_base = OTHER; note = 2'-fluoroadenosine-3'-phosphate
  modified_base 12: mod_base = OTHER; note = 2'-O-methylguanosine-3'-phosphate
  modified_base 13: mod_base = OTHER; note = 2'-O-methylcytidine-3'-phosphate
  modified_base 14: mod_base = OTHER; note = 2'-O-methylcytidine-3'-phosphate
  modified_base 15: mod_base = OTHER; note = 2'-O-methyluridine-3'-phosphate
  modified_base 16: mod_base = OTHER; note = 2'-O-methylguanosine-3'-phosphate
  modified_base 17: mod_base = OTHER; note = 2'-O-methylcytidine-3'-phosphate
  modified_base 18: mod_base = OTHER; note = 2'-O-methyladenosine-3'-phosphate
  modified_base 19: mod_base = OTHER; note = 2'-O-methylguanosine-3'-phosphate
  modified_base 20: mod_base = OTHER; note = 2'-O-methylcytidine-3'-phosphate
  modified_base 21: mod_base = OTHER; note = 2'-O-methyluridine-3'-phosphate N-[tris(N-acetylgalactosamine-alkyl)-amidodecanoyl)]-4-hydr oxyprolinol Hyp-(GalNAc-alkyl)3
gcctccgcgcagcctgcagct

SEQ ID NO: 411 - RNA, 21 nt, synthetic construct
  source 1..21: mol_type = other RNA; note = Description of Artificial Sequence: Synthetic oligonucleotide
  modified_base 1: mod_base = OTHER; note = 2'-O-methylcytidine-3'- phosphorothioate
  modified_base 2: mod_base = OTHER; note = 2'-O-methylcytidine-3'- phosphorothioate
  modified_base 3: mod_base = OTHER; note = 2'-O-methyluridine-3'-phosphate
  modified_base 4: mod_base = OTHER; note = 2'-O-methylguanosine-3'-phosphate
  modified_base 5: mod_base = OTHER; note = 2'-O-methyluridine-3'-phosphate
  modified_base 6: mod_base = OTHER; note = 2'-O-methylcytidine-3'-phosphate
  modified_base 7: mod_base = OTHER; note = 2'-fluorocytidine-3'-phosphate
  modified_base 8: mod_base = OTHER; note = 2'-O-methylcytidine-3'-phosphate
  modified_base 9: mod_base = OTHER; note = 2'-fluorocytidine-3'-phosphate
  modified_base 10: mod_base = OTHER; note = 2'-fluoroguanosine-3'-phosphate
  modified_base 11: mod_base = OTHER; note = 2'-fluorocytidine-3'-phosphate
  modified_base 12: mod_base = OTHER; note = 2'-O-methylcytidine-3'-phosphate
  modified_base 13: mod_base = OTHER; note = 2'-O-methylcytidine-3'-phosphate
  modified_base 14: mod_base = OTHER; note = 2'-O-methylcytidine-3'-phosphate
  modified_base 15: mod_base = OTHER; note = 2'-O-methyladenosine-3'-phosphate
  modified_base 16: mod_base = OTHER; note = 2'-O-methylguanosine-3'-phosphate
  modified_base 17: mod_base = OTHER; note = 2'-O-methylcytidine-3'-phosphate
  modified_base 18: mod_base = OTHER; note = 2'-O-methylcytidine-3'-phosphate
  modified_base 19: mod_base = OTHER; note = 2'-O-methylguanosine-3'-phosphate
  modified_base 20: mod_base = OTHER; note = 2'-O-methyluridine-3'-phosphate
  modified_base 21: mod_base = OTHER; note = 2'-O-methyluridine-3'-phosphate N-[tris(N-acetylgalactosamine-alkyl)-amidodecanoyl)]-4-hydr oxyprolinol Hyp-(GalNAc-alkyl)3
cctgtccccgccccagccgtt

SEQ ID NO: 412 - RNA, 21 nt, synthetic construct
  source 1..21: mol_type = other RNA; note = Description of Artificial Sequence: Synthetic oligonucleotide
  modified_base 1: mod_base = OTHER; note = 2'-O-methylcytidine-3'- phosphorothioate
  modified_base 2: mod_base = OTHER; note = 2'-O-methylcytidine-3'- phosphorothioate
  modified_base 3: mod_base = OTHER; note = 2'-O-methylcytidine-3'-phosphate
  modified_base 4: mod_base = OTHER; note = 2'-O-methylguanosine-3'-phosphate
  modified_base 5: mod_base = OTHER; note = 2'-O-methylcytidine-3'-phosphate
  modified_base 6: mod_base = OTHER; note = 2'-O-methylcytidine-3'-phosphate
  modified_base 7: mod_base = OTHER; note = 2'-fluorocytidine-3'-phosphate
  modified_base 8: mod_base = OTHER; note = 2'-O-methylcytidine-3'-phosphate
  modified_base 9: mod_base = OTHER; note = 2'-fluoroadenosine-3'-phosphate
  modified_base 10: mod_base = OTHER; note = 2'-fluoroguanosine-3'-phosphate
  modified_base 11: mod_base = OTHER; note = 2'-fluorocytidine-3'-phosphate
  modified_base 12: mod_base = OTHER; note = 2'-O-methylcytidine-3'-phosphate
  modified_base 13: mod_base = OTHER; note = 2'-O-methylguanosine-3'-phosphate
  modified_base 14: mod_base = OTHER; note = 2'-O-methyluridine-3'-phosphate
  modified_base 15: mod_base = OTHER; note = 2'-O-methylcytidine-3'-phosphate
  modified_base 16: mod_base = OTHER; note = 2'-O-methylcytidine-3'-phosphate
  modified_base 17: mod_base = OTHER; note = 2'-O-methyluridine-3'-phosphate
  modified_base 18: mod_base = OTHER; note = 2'-O-methylcytidine-3'-phosphate
  modified_base 19: mod_base = OTHER; note = 2'-O-methylcytidine-3'-phosphate
  modified_base 20: mod_base = OTHER; note = 2'-O-methyluridine-3'-phosphate
  modified_base 21: mod_base = OTHER; note = 2'-O-methyluridine-3'-phosphate N-[tris(N-acetylgalactosamine-alkyl)-amidodecanoyl)]-4-hydr oxyprolinol Hyp-(GalNAc-alkyl)3
cccgccccagccgtcctcctt

SEQ ID NO: 413 - RNA, 21 nt, synthetic construct
  source 1..21: mol_type = other RNA; note = Description of Artificial Sequence: Synthetic oligonucleotide
  modified_base 1: mod_base = OTHER; note = 2'-O-methylcytidine-3'- phosphorothioate
  modified_base 2: mod_base = OTHER; note = 2'-O-methylcytidine-3'- phosphorothioate
  modified_base 3: mod_base = OTHER; note = 2'-O-methylcytidine-3'-phosphate
  modified_base 4: mod_base = OTHER; note = 2'-O-methyladenosine-3'-phosphate
  modified_base 5: mod_base = OTHER; note = 2'-O-methylguanosine-3'-phosphate
  modified_base 6: mod_base = OTHER; note = 2'-O-methylcytidine-3'-phosphate
  modified_base 7: mod_base = OTHER; note = 2'-fluorocytidine-3'-phosphate
  modified_base 8: mod_base = OTHER; note = 2'-O-methylguanosine-3'-phosphate
  modified_base 9: mod_base = OTHER; note = 2'-fluorouridine-3'-phosphate
  modified_base 10: mod_base = OTHER; note = 2'-fluorocytidine-3'-phosphate
  modified_base 11: mod_base = OTHER; note = 2'-fluorocytidine-3'-phosphate
  modified_base 12: mod_base = OTHER; note = 2'-O-methyluridine-3'-phosphate
  modified_base 13: mod_base = OTHER; note = 2'-O-methylcytidine-3'-phosphate
  modified_base 14: mod_base = OTHER; note = 2'-O-methylcytidine-3'-phosphate
  modified_base 15: mod_base = OTHER; note = 2'-O-methyluridine-3'-phosphate
  modified_base 16: mod_base = OTHER; note = 2'-O-methylguanosine-3'-phosphate
  modified_base 17: mod_base = OTHER; note = 2'-O-methylguanosine-3'-phosphate
  modified_base 18: mod_base = OTHER; note = 2'-O-methylguanosine-3'-phosphate
  modified_base 19: mod_base = OTHER; note = 2'-O-methylguanosine-3'-phosphate
  modified_base 20: mod_base = OTHER; note = 2'-O-methyluridine-3'-phosphate
  modified_base 21: mod_base = OTHER; note = 2'-O-methyluridine-3'-phosphate N-[tris(N-acetylgalactosamine-alkyl)-amidodecanoyl)]-4-hydr oxyprolinol Hyp-(GalNAc-alkyl)3
cccagccgtcctcctggggtt

SEQ ID NO: 414 - RNA, 21 nt, synthetic construct
  source 1..21: mol_type = other RNA; note = Description of Artificial Sequence: Synthetic oligonucleotide
  modified_base 1: mod_base = OTHER; note = 2'-O-methyluridine-3'-phosphorothioate
  modified_base 2: mod_base = OTHER; note = 2'-O-methylcytidine-3'- phosphorothioate
  modified_base 3: mod_base = OTHER; note = 2'-O-methylcytidine-3'-phosphate
  modified_base 4: mod_base = OTHER; note = 2'-O-methyluridine-3'-phosphate
  modified_base 5: mod_base = OTHER; note = 2'-O-methylguanosine-3'-phosphate
  modified_base 6: mod_base = OTHER; note = 2'-O-methylguanosine-3'-phosphate
  modified_base 7: mod_base = OTHER; note = 2'-fluoroguanosine-3'-phosphate
  modified_base 8: mod_base = OTHER; note = 2'-O-methylguanosine-3'-phosphate
  modified_base 9: mod_base = OTHER; note = 2'-fluorouridine-3'-phosphate
  modified_base 10: mod_base = OTHER; note = 2'-fluoroguanosine-3'-phosphate
  modified_base 11: mod_base = OTHER; note = 2'-fluoroguanosine-3'-phosphate
  modified_base 12: mod_base = OTHER; note = 2'-O-methyladenosine-3'-phosphate
  modified_base 13: mod_base = OTHER; note = 2'-O-methylcytidine-3'-phosphate
  modified_base 14: mod_base = OTHER; note = 2'-O-methylcytidine-3'-phosphate
  modified_base 15: mod_base = OTHER; note = 2'-O-methylcytidine-3'-phosphate
  modified_base 16: mod_base = OTHER; note = 2'-O-methyluridine-3'-phosphate
  modified_base 17: mod_base = OTHER; note = 2'-O-methyladenosine-3'-phosphate
  modified_base 18: mod_base = OTHER; note = 2'-O-methylguanosine-3'-phosphate
  modified_base 19: mod_base = OTHER; note = 2'-O-methyluridine-3'-phosphate
  modified_base 20: mod_base = OTHER; note = 2'-O-methyluridine-3'-phosphate
  modified_base 21: mod_base = OTHER; note = 2'-O-methyluridine-3'-phosphate N-[tris(N-acetylgalactosamine-alkyl)-amidodecanoyl)]-4-hydr oxyprolinol Hyp-(GalNAc-alkyl)3
tcctggggtggaccctagttt

SEQ ID NO: 415 - RNA, 21 nt, synthetic construct
  source 1..21: mol_type = other RNA; note = Description of Artificial Sequence: Synthetic oligonucleotide
  modified_base 1: mod_base = OTHER; note = 2'-O-methylguanosine-3'- phosphorothioate
  modified_base 2: mod_base = OTHER; note = 2'-O-methylguanosine-3'- phosphorothioate
  modified_base 3: mod_base = OTHER; note = 2'-O-methylguanosine-3'-phosphate
  modified_base 4: mod_base = OTHER; note = 2'-O-methyluridine-3'-phosphate
  modified_base 5: mod_base = OTHER; note = 2'-O-methylguanosine-3'-phosphate
  modified_base 6: mod_base = OTHER; note = 2'-O-methylguanosine-3'-phosphate
  modified_base 7: mod_base = OTHER; note = 2'-fluoroadenosine-3'-phosphate
  modified_base 8: mod_base = OTHER; note = 2'-O-methylcytidine-3'-phosphate
  modified_base 9: mod_base = OTHER; note = 2'-fluorocytidine-3'-phosphate
  modified_base 10: mod_base = OTHER; note = 2'-fluorocytidine-3'-phosphate
  modified_base 11: mod_base = OTHER; note = 2'-fluorouridine-3'-phosphate
  modified_base 12: mod_base = OTHER; note = 2'-O-methyladenosine-3'-phosphate
  modified_base 13: mod_base = OTHER; note = 2'-O-methylguanosine-3'-phosphate
  modified_base 14: mod_base = OTHER; note = 2'-O-methyluridine-3'-phosphate
  modified_base 15: mod_base = OTHER; note = 2'-O-methyluridine-3'-phosphate
  modified_base 16: mod_base = OTHER; note = 2'-O-methyluridine-3'-phosphate
  modified_base 17: mod_base = OTHER; note = 2'-O-methyladenosine-3'-phosphate
  modified_base 18: mod_base = OTHER; note = 2'-O-methyladenosine-3'-phosphate
  modified_base 19: mod_base = OTHER; note = 2'-O-methyluridine-3'-phosphate
  modified_base 20: mod_base = OTHER; note = 2'-O-methyladenosine-3'-phosphate
  modified_base 21: mod_base = OTHER; note = 2'-O-methyluridine-3'-phosphate N-[tris(N-acetylgalactosamine-alkyl)-amidodecanoyl)]-4-hydr oxyprolinol Hyp-(GalNAc-alkyl)3
gggtggaccctagtttaatat

SEQ ID NO: 416 - RNA, 21 nt, synthetic construct
  source 1..21: mol_type = other RNA; note = Description of Artificial Sequence: Synthetic oligonucleotide
  modified_base 1: mod_base = OTHER; note = 2'-O-methylguanosine-3'- phosphorothioate
  modified_base 2: mod_base = OTHER; note = 2'-O-methyladenosine-3'- phosphorothioate
  modified_base 3: mod_base = OTHER; note = 2'-O-methylcytidine-3'-phosphate
  modified_base 4: mod_base = OTHER; note = 2'-O-methylcytidine-3'-phosphate
  modified_base 5: mod_base = OTHER; note = 2'-O-methylcytidine-3'-phosphate
  modified_base 6: mod_base = OTHER; note = 2'-O-methyluridine-3'-phosphate
  modified_base 7: mod_base = OTHER; note = 2'-fluoroadenosine-3'-phosphate
  modified_base 8: mod_base = OTHER; note = 2'-O-methylguanosine-3'-phosphate
  modified_base 9: mod_base = OTHER; note = 2'-fluorouridine-3'-phosphate
  modified_base 10: mod_base = OTHER; note = 2'-fluorouridine-3'-phosphate
  modified_base 11: mod_base = OTHER; note = 2'-fluorouridine-3'-phosphate
  modified_base 12: mod_base = OTHER; note = 2'-O-methyladenosine-3'-phosphate
  modified_base 13: mod_base = OTHER; note = 2'-O-methyladenosine-3'-phosphate
  modified_base 14: mod_base = OTHER; note = 2'-O-methyluridine-3'-phosphate
  modified_base 15: mod_base = OTHER; note = 2'-O-methyladenosine-3'-phosphate
  modified_base 16: mod_base = OTHER; note = 2'-O-methyladenosine-3'-phosphate
  modified_base 17: mod_base = OTHER; note = 2'-O-methyladenosine-3'-phosphate
  modified_base 18: mod_base = OTHER; note = 2'-O-methylguanosine-3'-phosphate
  modified_base 19: mod_base = OTHER; note = 2'-O-methyladenosine-3'-phosphate
  modified_base 20: mod_base = OTHER; note = 2'-O-methyluridine-3'-phosphate
  modified_base 21: mod_base = OTHER; note = 2'-O-methyluridine-3'-phosphate N-[tris(N-acetylgalactosamine-alkyl)-amidodecanoyl)]-4-hydr oxyprolinol Hyp-(GalNAc-alkyl)3
gaccctagtttaataaagatt

SEQ ID NO: 417 - RNA, 21 nt, synthetic construct
  source 1..21: mol_type = other RNA; note = Description of Artificial Sequence: Synthetic oligonucleotide
  modified_base 1: mod_base = OTHER; note = 2'-O-methyluridine-3'-phosphorothioate
  modified_base 2: mod_base = OTHER; note = 2'-O-methyladenosine-3'- phosphorothioate
  modified_base 3: mod_base = OTHER; note = 2'-O-methylguanosine-3'-phosphate
  modified_base 4: mod_base = OTHER; note = 2'-O-methyluridine-3'-phosphate
  modified_base 5: mod_base = OTHER; note = 2'-O-methyluridine-3'-phosphate
  modified_base 6: mod_base = OTHER; note = 2'-O-methyluridine-3'-phosphate
  modified_base 7: mod_base = OTHER; note = 2'-fluoroadenosine-3'-phosphate
  modified_base 8: mod_base = OTHER; note = 2'-O-methyladenosine-3'-phosphate
  modified_base 9: mod_base = OTHER; note = 2'-fluorouridine-3'-phosphate
  modified_base 10: mod_base = OTHER; note = 2'-fluoroadenosine-3'-phosphate
  modified_base 11: mod_base = OTHER; note = 2'-fluoroadenosine-3'-phosphate
  modified_base 12: mod_base = OTHER; note = 2'-O-methyladenosine-3'-phosphate
  modified_base 13: mod_base = OTHER; note = 2'-O-methylguanosine-3'-phosphate
  modified_base 14: mod_base = OTHER; note = 2'-O-methyladenosine-3'-phosphate
  modified_base 15: mod_base = OTHER; note = 2'-O-methyluridine-3'-phosphate
  modified_base 16: mod_base = OTHER; note = 2'-O-methyluridine-3'-phosphate
  modified_base 17: mod_base = OTHER; note = 2'-O-methylcytidine-3'-phosphate
  modified_base 18: mod_base = OTHER; note = 2'-O-methyladenosine-3'-phosphate
  modified_base 19: mod_base = OTHER; note = 2'-O-methylcytidine-3'-phosphate
  modified_base 20: mod_base = OTHER; note = 2'-O-methylcytidine-3'-phosphate
  modified_base 21: mod_base = OTHER; note = 2'-O-methyluridine-3'-phosphate N-[tris(N-acetylgalactosamine-alkyl)-amidodecanoyl)]-4-hydr oxyprolinol Hyp-(GalNAc-alkyl)3
tagtttaataaagattcacct

SEQ ID NO: 418 - RNA, 21 nt, synthetic construct
  source 1..21: mol_type = other RNA; note = Description of Artificial Sequence: Synthetic oligonucleotide
  modified_base 1: mod_base = OTHER; note = 2'-O-methyluridine-3'-phosphorothioate
  modified_base 2: mod_base = OTHER; note = 2'-O-methyladenosine-3'- phosphorothioate
  modified_base 3: mod_base = OTHER; note = 2'-O-methyladenosine-3'-phosphate
  modified_base 4: mod_base = OTHER; note = 2'-O-methyluridine-3'-phosphate
  modified_base 5: mod_base = OTHER; note = 2'-O-methyladenosine-3'-phosphate
  modified_base 6: mod_base = OTHER; note = 2'-O-methyladenosine-3'-phosphate
  modified_base 7: mod_base = OTHER; note = 2'-fluoroadenosine-3'-phosphate
  modified_base 8: mod_base = OTHER; note = 2'-O-methylguanosine-3'-phosphate
  modified_base 9: mod_base = OTHER; note = 2'-fluoroadenosine-3'-phosphate
  modified_base 10: mod_base = OTHER; note = 2'-fluorouridine-3'-phosphate
  modified_base 11: mod_base = OTHER; note = 2'-fluorouridine-3'-phosphate
  modified_base 12: mod_base = OTHER; note = 2'-O-methylcytidine-3'-phosphate
  modified_base 13: mod_base = OTHER; note = 2'-O-methyladenosine-3'-phosphate
  modified_base 14: mod_base = OTHER; note = 2'-O-methylcytidine-3'-phosphate
  modified_base 15: mod_base = OTHER; note = 2'-O-methylcytidine-3'-phosphate
  modified_base 16: mod_base = OTHER; note = 2'-O-methyladenosine-3'-phosphate
  modified_base 17: mod_base = OTHER; note = 2'-O-methyladenosine-3'-phosphate
  modified_base 18: mod_base = OTHER; note = 2'-O-methylguanosine-3'-phosphate
  modified_base 19: mod_base = OTHER; note = 2'-O-methyluridine-3'-phosphate
  modified_base 20: mod_base = OTHER; note = 2'-O-methyluridine-3'-phosphate
  modified_base 21: mod_base = OTHER; note = 2'-O-methyluridine-3'-phosphate N-[tris(N-acetylgalactosamine-alkyl)-amidodecanoyl)]-4-hydr oxyprolinol Hyp-(GalNAc-alkyl)3
taataaagattcaccaagttt

SEQ ID NO: 419 - RNA, 21 nt, synthetic construct
  source 1..21: mol_type = other RNA; note = Description of Artificial Sequence: Synthetic oligonucleotide
  modified_base 1: mod_base = OTHER; note = 2'-O-methyladenosine-3'- phosphorothioate
  modified_base 2: mod_base = OTHER; note = 2'-O-methylguanosine-3'- phosphorothioate
  modified_base 3: mod_base = OTHER; note = 2'-O-methyladenosine-3'-phosphate
  modified_base 4: mod_base = OTHER; note = 2'-O-methyluridine-3'-phosphate
  modified_base 5: mod_base = OTHER; note = 2'-O-methyluridine-3'-phosphate
  modified_base 6: mod_base = OTHER; note = 2'-O-methylcytidine-3'-phosphate
  modified_base 7: mod_base = OTHER; note = 2'-fluoroadenosine-3'-phosphate
  modified_base 8: mod_base = OTHER; note = 2'-O-methylcytidine-3'-phosphate
  modified_base 9: mod_base = OTHER; note = 2'-fluorocytidine-3'-phosphate
  modified_base 10: mod_base = OTHER; note = 2'-fluoroadenosine-3'-phosphate
  modified_base 11: mod_base = OTHER; note = 2'-fluoroadenosine-3'-phosphate
  modified_base 12: mod_base = OTHER; note = 2'-O-methylguanosine-3'-phosphate
  modified_base 13: mod_base = OTHER; note = 2'-O-methyluridine-3'-phosphate
  modified_base 14: mod_base = OTHER; note = 2'-O-methyluridine-3'-phosphate
  modified_base 15: mod_base = OTHER; note = 2'-O-methyluridine-3'-phosphate
  modified_base 16: mod_base = OTHER; note = 2'-O-methylcytidine-3'-phosphate
  modified_base 17: mod_base = OTHER; note = 2'-O-methyladenosine-3'-phosphate
  modified_base 18: mod_base = OTHER; note = 2'-O-methylcytidine-3'-phosphate
  modified_base 19: mod_base = OTHER; note = 2'-O-methylguanosine-3'-phosphate
  modified_base 20: mod_base = OTHER; note = 2'-O-methylcytidine-3'-phosphate
  modified_base 21: mod_base = OTHER; note = 2'-O-methyluridine-3'-phosphate N-[tris(N-acetylgalactosamine-alkyl)-amidodecanoyl)]-4-hydr oxyprolinol Hyp-(GalNAc-alkyl)3
agattcaccaagtttcacgct

SEQ ID NO: 420 - RNA, 23 nt, synthetic construct
  source 1..23: mol_type = other RNA; note = Description of Artificial Sequence: Synthetic oligonucleotide
  modified_base 1: mod_base = OTHER; note = 2'-O-methyladenosine-3'- phosphorothioate
  modified_base 2: mod_base = OTHER; note = 2'-fluorocytidine-3'-phosphorothioate
  modified_base 3: mod_base = OTHER; note = 2'-O-methyluridine-3'-phosphate
  modified_base 4: mod_base = OTHER; note = 2'-O-methyluridine-3'-phosphate
  modified_base 5: mod_base = OTHER; note = 2'-O-methylcytidine-3'-phosphate
  modified_base 6: mod_base = OTHER; note = 2'-fluorocytidine-3'-phosphate
  modified_base 7: mod_base = OTHER; note = 2'-O-methyluridine-3'-phosphate
  modified_base 8: mod_base = OTHER; note = 2'-fluoroguanosine-3'-phosphate
  modified_base 9: mod_base = OTHER; note = 2'-fluorocytidine-3'-phosphate
  modified_base 10: mod_base = OTHER; note = 2'-O-methylcytidine-3'-phosphate
  modified_base 11: mod_base = OTHER; note = 2'-O-methyluridine-3'-phosphate
  modified_base 12: mod_base = OTHER; note = 2'-O-methylguanosine-3'-phosphate
  modified_base 13: mod_base = OTHER; note = 2'-O-methyluridine-3'-phosphate
  modified_base 14: mod_base = OTHER; note = 2'-fluoroguanosine-3'-phosphate
  modified_base 15: mod_base = OTHER; note = 2'-O-methyladenosine-3'-phosphate
  modified_base 16: mod_base = OTHER; note = 2'-fluorouridine-3'-phosphate
  modified_base 17: mod_base = OTHER; note = 2'-O-methyluridine-3'-phosphate
  modified_base 18: mod_base = OTHER; note = 2'-O-methylguanosine-3'-phosphate
  modified_base 19: mod_base = OTHER; note = 2'-O-methylguanosine-3'-phosphate
  modified_base 20: mod_base = OTHER; note = 2'-O-methylcytidine-3'-phosphate
  modified_base 21: mod_base = OTHER; note = 2'-O-methylcytidine-3'- phosphorothioate
  modified_base 22: mod_base = OTHER; note = 2'-O-methyladenosine-3'- phosphorothioate
  modified_base 23: mod_base = OTHER; note = 2'-O-methylguanosine-3'-phosphate
acttcctgcctgtgattggccag

SEQ ID NO: 421 - RNA, 23 nt, synthetic construct
  source 1..23: mol_type = other RNA; note = Description of Artificial Sequence: Synthetic oligonucleotide
  modified_base 1: mod_base = OTHER; note = 2'-O-methyladenosine-3'- phosphorothioate
  modified_base 2: mod_base = OTHER; note = 2'-fluoroadenosine-3'-phosphorothioate
  modified_base 3: mod_base = OTHER; note = 2'-O-methyladenosine-3'-phosphate
  modified_base 4: mod_base = OTHER; note = 2'-O-methylcytidine-3'-phosphate
  modified_base 5: mod_base = OTHER; note = 2'-O-methylcytidine-3'-phosphate
  modified_base 6: mod_base = OTHER; note = 2'-fluorouridine-3'-phosphate
  modified_base 7: mod_base = OTHER; note = 2'-O-methyluridine-3'-phosphate
  modified_base 8: mod_base = OTHER; note = 2'-fluorocytidine-3'-phosphate
  modified_base 9: mod_base = OTHER; note = 2'-fluoroadenosine-3'-phosphate
  modified_base 10: mod_base = OTHER; note = 2'-O-methyluridine-3'-phosphate
  modified_base 11: mod_base = OTHER; note = 2'-O-methylcytidine-3'-phosphate
  modified_base 12: mod_base = OTHER; note = 2'-O-methyluridine-3'-phosphate
  modified_base 13: mod_base = OTHER; note = 2'-O-methyluridine-3'-phosphate
  modified_base 14: mod_base = OTHER; note = 2'-fluorocytidine-3'-phosphate
  modified_base 15: mod_base = OTHER; note = 2'-O-methylcytidine-3'-phosphate
  modified_base 16: mod_base = OTHER; note = 2'-fluorouridine-3'-phosphate
  modified_base 17: mod_base = OTHER; note = 2'-O-methylguanosine-3'-phosphate
  modified_base 18: mod_base = OTHER; note = 2'-O-methylcytidine-3'-phosphate
  modified_base 19: mod_base = OTHER; note = 2'-O-methylcytidine-3'-phosphate
  modified_base 20: mod_base = OTHER; note = 2'-O-methyluridine-3'-phosphate
  modified_base 21: mod_base = OTHER; note = 2'-O-methylguanosine-3'- phosphorothioate
  modified_base 22: mod_base = OTHER; note = 2'-O-methyluridine-3'-phosphorothioate
  modified_base 23: mod_base = OTHER; note = 2'-O-methylguanosine-3'-phosphate
aaaccttcatcttcctgcctgtg

SEQ ID NO: 422 - RNA, 23 nt, synthetic construct
  source 1..23: mol_type = other RNA; note = Description of Artificial Sequence: Synthetic oligonucleotide
  modified_base 1: mod_base = OTHER; note = 2'-O-methyladenosine-3'- phosphorothioate
  modified_base 2: mod_base = OTHER; note = 2'-fluorocytidine-3'-phosphorothioate
  modified_base 3: mod_base = OTHER; note = 2'-O-methyladenosine-3'-phosphate
  modified_base 4: mod_base = OTHER; note = 2'-O-methylcytidine-3'-phosphate
  modified_base 5: mod_base = OTHER; note = 2'-O-methyladenosine-3'-phosphate
  modified_base 6: mod_base = OTHER; note = 2'-fluoroguanosine-3'-phosphate
  modified_base 7: mod_base = OTHER; note = 2'-O-methyladenosine-3'-phosphate
  modified_base 8: mod_base = OTHER; note = 2'-fluoroadenosine-3'-phosphate
  modified_base 9: mod_base = OTHER; note = 2'-fluorocytidine-3'-phosphate
  modified_base 10: mod_base = OTHER; note = 2'-O-methylcytidine-3'-phosphate
  modified_base 11: mod_base = OTHER; note = 2'-O-methyluridine-3'-phosphate
  modified_base 12: mod_base = OTHER; note = 2'-O-methyluridine-3'-phosphate
  modified_base 13: mod_base = OTHER; note = 2'-O-methylcytidine-3'-phosphate
  modified_base 14: mod_base = OTHER; note = 2'-fluoroadenosine-3'-phosphate
  modified_base 15: mod_base = OTHER; note = 2'-O-methyluridine-3'-phosphate
  modified_base 16: mod_base = OTHER; note = 2'-fluorocytidine-3'-phosphate
  modified_base 17: mod_base = OTHER; note = 2'-O-methyluridine-3'-phosphate
  modified_base 18: mod_base = OTHER; note = 2'-O-methyluridine-3'-phosphate
  modified_base 19: mod_base = OTHER; note = 2'-O-methylcytidine-3'-phosphate
  modified_base 20: mod_base = OTHER; note = 2'-O-methylcytidine-3'-phosphate
  modified_base 21: mod_base = OTHER; note = 2'-O-methyluridine-3'-phosphorothioate
  modified_base 22: mod_base = OTHER; note = 2'-O-methylguanosine-3'- phosphorothioate
  modified_base 23: mod_base = OTHER; note = 2'-O-methylcytidine-3'-phosphate
acacagaaccttcatcttcctgc

SEQ ID NO: 423 - RNA, 23 nt, synthetic construct
  source 1..23: mol_type = other RNA; note = Description of Artificial Sequence: Synthetic oligonucleotide
  modified_base 1: mod_base = OTHER; note = 2'-O-methyladenosine-3'- phosphorothioate
  modified_base 2: mod_base = OTHER; note = 2'-fluoroguanosine-3'-phosphorothioate
  modified_base 3: mod_base = OTHER; note = 2'-O-methylcytidine-3'-phosphate
  modified_base 4: mod_base = OTHER; note = 2'-O-methyladenosine-3'-phosphate
  modified_base 5: mod_base = OTHER; note = 2'-O-methylguanosine-3'-phosphate
  modified_base 6: mod_base = OTHER; note = 2'-fluorocytidine-3'-phosphate
  modified_base 7: mod_base = OTHER; note = 2'-O-methylcytidine-3'-phosphate
  modified_base 8: mod_base = OTHER; note = 2'-fluorocytidine-3'-phosphate
  modified_base 9: mod_base = OTHER; note = 2'-fluoroadenosine-3'-phosphate
  modified_base 10: mod_base = OTHER; note = 2'-O-methylcytidine-3'-phosphate
  modified_base 11: mod_base = OTHER; note = 2'-O-methyladenosine-3'-phosphate
  modified_base 12: mod_base = OTHER; note = 2'-O-methylguanosine-3'-phosphate
  modified_base 13: mod_base = OTHER; note = 2'-O-methyladenosine-3'-phosphate
  modified_base 14: mod_base = OTHER; note = 2'-fluoroadenosine-3'-phosphate
  modified_base 15: mod_base = OTHER; note = 2'-O-methylcytidine-3'-phosphate
  modified_base 16: mod_base = OTHER; note = 2'-fluorocytidine-3'-phosphate
  modified_base 17: mod_base = OTHER; note = 2'-O-methyluridine-3'-phosphate
  modified_base 18: mod_base = OTHER; note = 2'-O-methyluridine-3'-phosphate
  modified_base 19: mod_base = OTHER; note = 2'-O-methylcytidine-3'-phosphate
  modified_base 20: mod_base = OTHER; note = 2'-O-methyladenosine-3'-phosphate
  modified_base 21: mod_base = OTHER; note = 2'-O-methyluridine-3'-phosphorothioate
  modified_base 22: mod_base = OTHER; note = 2'-O-methylcytidine-3'- phosphorothioate
  modified_base 23: mod_base = OTHER; note = 2'-O-methyluridine-3'-phosphate
agcagcccacagaaccttcatct

SEQ ID NO: 424 - RNA, 23 nt, synthetic construct
  source 1..23: mol_type = other RNA; note = Description of Artificial Sequence: Synthetic oligonucleotide
  modified_base 1: mod_base = OTHER; note = 2'-O-methyladenosine-3'- phosphorothioate
  modified_base 2: mod_base = OTHER; note = 2'-fluorocytidine-3'-phosphorothioate
  modified_base 3: mod_base = OTHER; note = 2'-O-methyladenosine-3'-phosphate
  modified_base 4: mod_base = OTHER; note = 2'-O-methylguanosine-3'-phosphate
  modified_base 5: mod_base = OTHER; note = 2'-O-methylcytidine-3'-phosphate
  modified_base 6: mod_base = OTHER; note = 2'-fluoroadenosine-3'-phosphate
  modified_base 7: mod_base = OTHER; note = 2'-O-methyladenosine-3'-phosphate
  modified_base 8: mod_base = OTHER; note = 2'-fluorocytidine-3'-phosphate
  modified_base 9: mod_base = OTHER; note = 2'-fluoroguanosine-3'-phosphate
  modified_base 10: mod_base = OTHER; note = 2'-O-methylcytidine-3'-phosphate
  modified_base 11: mod_base = OTHER; note = 2'-O-methyladenosine-3'-phosphate
  modified_base 12: mod_base = OTHER; note = 2'-O-methylguanosine-3'-phosphate
  modified_base 13: mod_base = OTHER; note = 2'-O-methylcytidine-3'-phosphate
  modified_base 14: mod_base = OTHER; note = 2'-fluorocytidine-3'-phosphate
  modified_base 15: mod_base = OTHER; note = 2'-O-methylcytidine-3'-phosphate
  modified_base 16: mod_base = OTHER; note = 2'-fluoroadenosine-3'-phosphate
  modified_base 17: mod_base = OTHER; note = 2'-O-methylcytidine-3'-phosphate
  modified_base 18: mod_base = OTHER; note = 2'-O-methyladenosine-3'-phosphate
  modified_base 19: mod_base = OTHER; note = 2'-O-methylguanosine-3'-phosphate
  modified_base 20: mod_base = OTHER; note = 2'-O-methyladenosine-3'-phosphate
  modified_base 21: mod_base = OTHER; note = 2'-O-methyladenosine-3'- phosphorothioate
  modified_base 22: mod_base = OTHER; note = 2'-O-methylcytidine-3'- phosphorothioate
  modified_base 23: mod_base = OTHER; note = 2'-O-methylcytidine-3'-phosphate
acagcaacgcagcccacagaacc

SEQ ID NO: 425 - RNA, 23 nt, synthetic construct
  source 1..23: mol_type = other RNA; note = Description of Artificial Sequence: Synthetic oligonucleotide
  modified_base 1: mod_base = OTHER; note = 2'-O-methyladenosine-3'- phosphorothioate
  modified_base 2: mod_base = OTHER; note = 2'-fluoroguanosine-3'-phosphorothioate
  modified_base 3: mod_base = OTHER; note = 2'-O-methyluridine-3'-phosphate
  modified_base 4: mod_base = OTHER; note = 2'-O-methylguanosine-3'-phosphate
  modified_base 5: mod_base = OTHER; note = 2'-O-methyladenosine-3'-phosphate
  modified_base 6: mod_base = OTHER; note = 2'-fluorocytidine-3'-phosphate
  modified_base 7: mod_base = OTHER; note = 2'-O-methylcytidine-3'-phosphate
  modified_base 8: mod_base = OTHER; note = 2'-fluoroadenosine-3'-phosphate
  modified_base 9: mod_base = OTHER; note = 2'-fluoroguanosine-3'-phosphate
  modified_base 10: mod_base = OTHER; note = 2'-O-methylcytidine-3'-phosphate
  modified_base 11: mod_base = OTHER; note = 2'-O-methyladenosine-3'-phosphate
  modified_base 12: mod_base = OTHER; note = 2'-O-methyladenosine-3'-phosphate
  modified_base 13: mod_base = OTHER; note = 2'-O-methylcytidine-3'-phosphate
  modified_base 14: mod_base = OTHER; note = 2'-fluoroguanosine-3'-phosphate
  modified_base 15: mod_base = OTHER; note = 2'-O-methylcytidine-3'-phosphate
  modified_base 16: mod_base = OTHER; note = 2'-fluoroadenosine-3'-phosphate
  modified_base 17: mod_base = OTHER; note = 2'-O-methylguanosine-3'-phosphate
  modified_base 18: mod_base = OTHER; note = 2'-O-methylcytidine-3'-phosphate
  modified_base 19: mod_base = OTHER; note = 2'-O-methylcytidine-3'-phosphate
  modified_base 20: mod_base = OTHER; note = 2'-O-methylcytidine-3'-phosphate
  modified_base 21: mod_base = OTHER; note = 2'-O-methyladenosine-3'- phosphorothioate
  modified_base 22: mod_base = OTHER; note = 2'-O-methylcytidine-3'- phosphorothioate
  modified_base 23: mod_base = OTHER; note = 2'-O-methyladenosine-3'-phosphate
agtgaccagcaacgcagcccaca

SEQ ID NO: 426 - RNA, 23 nt, synthetic construct
  source 1..23: mol_type = other RNA; note = Description of Artificial Sequence: Synthetic oligonucleotide
  modified_base 1: mod_base = OTHER; note = 2'-O-methyladenosine-3'- phosphorothioate
  modified_base 2: mod_base = OTHER; note = 2'-fluoroadenosine-3'-phosphorothioate
  modified_base 3: mod_base = OTHER; note = 2'-O-methylguanosine-3'-phosphate
  modified_base 4: mod_base = OTHER; note = 2'-O-methylguanosine-3'-phosphate
  modified_base 5: mod_base = OTHER; note = 2'-O-methyladenosine-3'-phosphate
  modified_base 6: mod_base = OTHER; note = 2'-fluoroadenosine-3'-phosphate
  modified_base 7: mod_base = OTHER; note = 2'-O-methyluridine-3'-phosphate
  modified_base 8: mod_base = OTHER; note = 2'-fluoroguanosine-3'-phosphate
  modified_base 9: mod_base = OTHER; note = 2'-fluorouridine-3'-phosphate
  modified_base 10: mod_base = OTHER; note = 2'-O-methylguanosine-3'-phosphate
  modified_base 11: mod_base = OTHER; note = 2'-O-methyladenosine-3'-phosphate
  modified_base 12: mod_base = OTHER; note = 2'-O-methylcytidine-3'-phosphate
  modified_base 13: mod_base = OTHER; note = 2'-O-methylcytidine-3'-phosphate
  modified_base 14: mod_base = OTHER; note = 2'-fluoroadenosine-3'-phosphate
  modified_base 15: mod_base = OTHER; note = 2'-O-methylguanosine-3'-phosphate
  modified_base 16: mod_base = OTHER; note = 2'-fluorocytidine-3'-phosphate
  modified_base 17: mod_base = OTHER; note = 2'-O-methyladenosine-3'-phosphate
  modified_base 18: mod_base = OTHER; note = 2'-O-methyladenosine-3'-phosphate
  modified_base 19: mod_base = OTHER; note = 2'-O-methylcytidine-3'-phosphate
  modified_base 20: mod_base = OTHER; note = 2'-O-methylguanosine-3'-phosphate
  modified_base 21: mod_base = OTHER; note = 2'-O-methylcytidine-3'- phosphorothioate
  modified_base 22: mod_base = OTHER; note = 2'-O-methyladenosine-3'- phosphorothioate
  modified_base 23: mod_base = OTHER; note = 2'-O-methylguanosine-3'-phosphate
aaggaatgtgaccagcaacgcag

SEQ ID NO: 427 - RNA, 23 nt, synthetic construct
  source 1..23: mol_type = other RNA; note = Description of Artificial Sequence: Synthetic oligonucleotide
  modified_base 1: mod_base = OTHER; note = 2'-O-methyladenosine-3'- phosphorothioate
  modified_base 2: mod_base = OTHER; note = 2'-fluorocytidine-3'-phosphorothioate
  modified_base 3: mod_base = OTHER; note = 2'-O-methyluridine-3'-phosphate
  modified_base 4: mod_base = OTHER; note = 2'-O-methylguanosine-3'-phosphate
  modified_base 5: mod_base = OTHER; note = 2'-O-methylcytidine-3'-phosphate
  modified_base 6: mod_base = OTHER; note = 2'-fluorocytidine-3'-phosphate
  modified_base 7: mod_base = OTHER; note = 2'-O-methyladenosine-3'-phosphate
  modified_base 8: mod_base = OTHER; note = 2'-fluoroguanosine-3'-phosphate
  modified_base 9: mod_base = OTHER; note = 2'-fluoroguanosine-3'-phosphate
  modified_base 10: mod_base = OTHER; note = 2'-O-methyladenosine-3'-phosphate
  modified_base 11: mod_base = OTHER; note = 2'-O-methyladenosine-3'-phosphate
  modified_base 12: mod_base = OTHER; note = 2'-O-methyluridine-3'-phosphate
  modified_base 13: mod_base = OTHER; note = 2'-O-methylguanosine-3'-phosphate
  modified_base 14: mod_base = OTHER; note = 2'-fluorouridine-3'-phosphate
  modified_base 15: mod_base = OTHER; note = 2'-O-methylguanosine-3'-phosphate
  modified_base 16: mod_base = OTHER; note = 2'-fluoroadenosine-3'-phosphate
  modified_base 17: mod_base = OTHER; note = 2'-O-methylcytidine-3'-phosphate
  modified_base 18: mod_base = OTHER; note = 2'-O-methylcytidine-3'-phosphate
  modified_base 19: mod_base = OTHER; note = 2'-O-methyladenosine-3'-phosphate
  modified_base 20: mod_base = OTHER; note = 2'-O-methylguanosine-3'-phosphate
  modified_base 21: mod_base = OTHER; note = 2'-O-methylcytidine-3'- phosphorothioate
  modified_base 22: mod_base = OTHER; note = 2'-O-methyladenosine-3'- phosphorothioate
  modified_base 23: mod_base = OTHER; note = 2'-O-methyladenosine-3'-phosphate
actgccaggaatgtgaccagcaa

SEQ ID NO: 428 - RNA, 23 nt, synthetic construct
  source 1..23: mol_type = other RNA; note = Description of Artificial Sequence: Synthetic oligonucleotide
  modified_base 1: mod_base = OTHER; note = 2'-O-methyladenosine-3'- phosphorothioate
  modified_base 2: mod_base = OTHER; note = 2'-fluoroguanosine-3'-phosphorothioate
  modified_base 3: mod_base = OTHER; note = 2'-O-methylcytidine-3'-phosphate
  modified_base 4: mod_base = OTHER; note = 2'-O-methyladenosine-3'-phosphate
  modified_base 5: mod_base = OTHER; note = 2'-O-methyluridine-3'-phosphate
  modified_base 6: mod_base = OTHER; note = 2'-fluorocytidine-3'-phosphate
  modified_base 7: mod_base = OTHER; note = 2'-O-methylcytidine-3'-phosphate
  modified_base 8: mod_base = OTHER; note = 2'-fluorouridine-3'-phosphate
  modified_base 9: mod_base = OTHER; note = 2'-fluoroguanosine-3'-phosphate
  modified_base 10: mod_base = OTHER; note = 2'-O-methylcytidine-3'-phosphate
  modified_base 11: mod_base = OTHER; note = 2'-O-methylcytidine-3'-phosphate
  modified_base 12: mod_base = OTHER; note = 2'-O-methyladenosine-3'-phosphate
  modified_base 13: mod_base = OTHER; note = 2'-O-methylguanosine-3'-phosphate
  modified_base 14: mod_base = OTHER; note = 2'-fluoroguanosine-3'-phosphate
  modified_base 15: mod_base = OTHER; note = 2'-O-methyladenosine-3'-phosphate
  modified_base 16: mod_base = OTHER; note = 2'-fluoroadenosine-3'-phosphate
  modified_base 17: mod_base = OTHER; note = 2'-O-methyluridine-3'-phosphate
  modified_base 18: mod_base = OTHER; note = 2'-O-methylguanosine-3'-phosphate
  modified_base 19: mod_base = OTHER; note = 2'-O-methyluridine-3'-phosphate
  modified_base 20: mod_base = OTHER; note = 2'-O-methylguanosine-3'-phosphate
  modified_base 21: mod_base = OTHER; note = 2'-O-methyladenosine-3'- phosphorothioate
  modified_base 22: mod_base = OTHER; note = 2'-O-methylcytidine-3'- phosphorothioate
  modified_base 23: mod_base = OTHER; note = 2'-O-methylcytidine-3'-phosphate
agcatcctgccaggaatgtgacc

SEQ ID NO: 429 - RNA, 23 nt, synthetic construct
  source 1..23: mol_type = other RNA; note = Description of Artificial Sequence: Synthetic oligonucleotide
  modified_base 1: mod_base = OTHER; note = 2'-O-methyladenosine-3'- phosphorothioate
  modified_base 2: mod_base = OTHER; note = 2'-fluorocytidine-3'-phosphorothioate
  modified_base 3: mod_base = OTHER; note = 2'-O-methyluridine-3'-phosphate
  modified_base 4: mod_base = OTHER; note = 2'-O-methyluridine-3'-phosphate
  modified_base 5: mod_base = OTHER; note = 2'-O-methylguanosine-3'-phosphate
  modified_base 6: mod_base = OTHER; note = 2'-fluoroguanosine-3'-phosphate
  modified_base 7: mod_base = OTHER; note = 2'-O-methylcytidine-3'-phosphate
  modified_base 8: mod_base = OTHER; note = 2'-fluorocytidine-3'-phosphate
  modified_base 9: mod_base = OTHER; note = 2'-fluorouridine-3'-phosphate
  modified_base 10: mod_base = OTHER; note = 2'-O-methylguanosine-3'-phosphate
  modified_base 11: mod_base = OTHER; note = 2'-O-methylguanosine-3'-phosphate
  modified_base 12: mod_base = OTHER; note = 2'-O-methylcytidine-3'-phosphate
  modified_base 13: mod_base = OTHER; note = 2'-O-methyladenosine-3'-phosphate
  modified_base 14: mod_base = OTHER; note = 2'-fluorouridine-3'-phosphate
  modified_base 15: mod_base = OTHER; note = 2'-O-methylcytidine-3'-phosphate
  modified_base 16: mod_base = OTHER; note = 2'-fluorocytidine-3'-phosphate
  modified_base 17: mod_base = OTHER; note = 2'-O-methyluridine-3'-phosphate
  modified_base 18: mod_base = OTHER; note = 2'-O-methylguanosine-3'-phosphate
  modified_base 19: mod_base = OTHER; note = 2'-O-methylcytidine-3'-phosphate
  modified_base 20: mod_base = OTHER; note = 2'-O-methylcytidine-3'-phosphate
  modified_base 21: mod_base = OTHER; note = 2'-O-methyladenosine-3'- phosphorothioate
  modified_base 22: mod_base = OTHER; note = 2'-O-methylguanosine-3'- phosphorothioate
  modified_base 23: mod_base = OTHER; note = 2'-O-methylguanosine-3'-phosphate
acttggcctggcatcctgccagg

SEQ ID NO: 430 - RNA, 23 nt, synthetic construct
  source 1..23: mol_type = other RNA; note = Description of Artificial Sequence: Synthetic oligonucleotide
  modified_base 1: mod_base = OTHER; note = 2'-O-methyladenosine-3'- phosphorothioate
  modified_base 2: mod_base = OTHER; note = 2'-fluoroguanosine-3'-phosphorothioate
  modified_base 3: mod_base = OTHER; note = 2'-O-methylcytidine-3'-phosphate
  modified_base 4: mod_base = OTHER; note = 2'-O-methyluridine-3'-phosphate
  modified_base 5: mod_base = OTHER; note = 2'-O-methyluridine-3'-phosphate
  modified_base 6: mod_base = OTHER; note = 2'-fluoroguanosine-3'-phosphate
  modified_base 7: mod_base = OTHER; note = 2'-O-methylcytidine-3'-phosphate
  modified_base 8: mod_base = OTHER; note = 2'-fluorouridine-3'-phosphate
  modified_base 9: mod_base = OTHER; note = 2'-fluorocytidine-3'-phosphate
  modified_base 10: mod_base = OTHER; note = 2'-O-methylcytidine-3'-phosphate
  modified_base 11: mod_base = OTHER; note = 2'-O-methyladenosine-3'-phosphate
  modified_base 12: mod_base = OTHER; note = 2'-O-methylcytidine-3'-phosphate
  modified_base 13: mod_base = OTHER; note = 2'-O-methylcytidine-3'-phosphate
  modified_base 14: mod_base = OTHER; note = 2'-fluorouridine-3'-phosphate
  modified_base 15: mod_base = OTHER; note = 2'-O-methyluridine-3'-phosphate
  modified_base 16: mod_base = OTHER; note = 2'-fluoroguanosine-3'-phosphate
  modified_base 17: mod_base = OTHER; note = 2'-O-methylguanosine-3'-phosphate
  modified_base 18: mod_base = OTHER; note = 2'-O-methylcytidine-3'-phosphate
  modified_base 19: mod_base = OTHER; note = 2'-O-methylcytidine-3'-phosphate
  modified_base 20: mod_base = OTHER; note = 2'-O-methyluridine-3'-phosphate
  modified_base 21: mod_base = OTHER; note = 2'-O-methylguanosine-3'- phosphorothioate
  modified_base 22: mod_base = OTHER; note = 2'-O-methylguanosine-3'- phosphorothioate
  modified_base 23: mod_base = OTHER; note = 2'-O-methylcytidine-3'-phosphate
agcttgctccaccttggcctggc

SEQ ID NO: 431 - RNA, 23 nt, synthetic construct
  source 1..23: mol_type = other RNA; note = Description of Artificial Sequence: Synthetic oligonucleotide
  modified_base 1: mod_base = OTHER; note = 2'-O-methyladenosine-3'- phosphorothioate
  modified_base 2: mod_base = OTHER; note = 2'-fluorouridine -3'-phosphorothioate
  modified_base 3: mod_base = OTHER; note = 2'-O-methylcytidine-3'-phosphate
  modified_base 4: mod_base = OTHER; note = 2'-O-methylcytidine-3'-phosphate
  modified_base 5: mod_base = OTHER; note = 2'-O-methyladenosine-3'-phosphate
  modified_base 6: mod_base = OTHER; note = 2'-fluorocytidine-3'-phosphate
  modified_base 7: mod_base = OTHER; note = 2'-O-methylcytidine-3'-phosphate
  modified_base 8: mod_base = OTHER; note = 2'-fluoroguanosine-3'-phosphate
  modified_base 9: mod_base = OTHER; note = 2'-fluorocytidine-3'-phosphate
  modified_base 10: mod_base = OTHER; note = 2'-O-methyluridine-3'-phosphate
  modified_base 11: mod_base = OTHER; note = 2'-O-methyluridine-3'-phosphate
  modified_base 12: mod_base = OTHER; note = 2'-O-methylguanosine-3'-phosphate
  modified_base 13: mod_base = OTHER; note = 2'-O-methylcytidine-3'-phosphate
  modified_base 14: mod_base = OTHER; note = 2'-fluorouridine-3'-phosphate
  modified_base 15: mod_base = OTHER; note = 2'-O-methylcytidine-3'-phosphate
  modified_base 16: mod_base = OTHER; note = 2'-fluorocytidine-3'-phosphate
  modified_base 17: mod_base = OTHER; note = 2'-O-methyladenosine-3'-phosphate
  modified_base 18: mod_base = OTHER; note = 2'-O-methylcytidine-3'-phosphate
  modified_base 19: mod_base = OTHER; note = 2'-O-methylcytidine-3'-phosphate
  modified_base 20: mod_base = OTHER; note = 2'-O-methyluridine-3'-phosphate
  modified_base 21: mod_base = OTHER; note = 2'-O-methyluridine-3'-phosphorothioate
  modified_base 22: mod_base = OTHER; note = 2'-O-methylguanosine-3'- phosphorothioate
  modified_base 23: mod_base = OTHER; note = 2'-O-methylguanosine-3'-phosphate
atccaccgcttgctccaccttgg

SEQ ID NO: 432 - RNA, 23 nt, synthetic construct
  source 1..23: mol_type = other RNA; note = Description of Artificial Sequence: Synthetic oligonucleotide
  modified_base 1: mod_base = OTHER; note = 2'-O-methyladenosine-3'- phosphorothioate
  modified_base 2: mod_base = OTHER; note = 2'-fluoroguanosine-3'-phosphorothioate
  modified_base 3: mod_base = OTHER; note = 2'-O-methylguanosine-3'-phosphate
  modified_base 4: mod_base = OTHER; note = 2'-O-methylcytidine-3'-phosphate
  modified_base 5: mod_base = OTHER; note = 2'-O-methyluridine-3'-phosphate
  modified_base 6: mod_base = OTHER; note = 2'-fluorocytidine-3'-phosphate
  modified_base 7: mod_base = OTHER; note = 2'-O-methyluridine-3'-phosphate
  modified_base 8: mod_base = OTHER; note = 2'-fluoroguanosine-3'-phosphate
  modified_base 9: mod_base = OTHER; note = 2'-fluorouridine-3'-phosphate
  modified_base 10: mod_base = OTHER; note = 2'-O-methylcytidine-3'-phosphate
  modified_base 11: mod_base = OTHER; note = 2'-O-methyluridine-3'-phosphate
  modified_base 12: mod_base = OTHER; note = 2'-O-methylcytidine-3'-phosphate
  modified_base 13: mod_base = OTHER; note = 2'-O-methylcytidine-3'-phosphate
  modified_base 14: mod_base = OTHER; note = 2'-fluoroadenosine-3'-phosphate
  modified_base 15: mod_base = OTHER; note = 2'-O-methylcytidine-3'-phosphate
  modified_base 16: mod_base = OTHER; note = 2'-fluorocytidine-3'-phosphate
  modified_base 17: mod_base = OTHER; note = 2'-O-methylguanosine-3'-phosphate
  modified_base 18: mod_base = OTHER; note = 2'-O-methylcytidine-3'-phosphate
  modified_base 19: mod_base = OTHER; note = 2'-O-methyluridine-3'-phosphate
  modified_base 20: mod_base = OTHER; note = 2'-O-methyluridine-3'-phosphate
  modified_base 21: mod_base = OTHER; note = 2'-O-methylguanosine-3'- phosphorothioate
  modified_base 22: mod_base = OTHER; note = 2'-O-methylcytidine-3'- phosphorothioate
  modified_base 23: mod_base = OTHER; note = 2'-O-methyluridine-3'-phosphate
aggctctgtctccaccgcttgct

SEQ ID NO: 433 - RNA, 23 nt, synthetic construct
  source 1..23: mol_type = other RNA; note = Description of Artificial Sequence: Synthetic oligonucleotide
  modified_base 1: mod_base = OTHER; note = 2'-O-methyladenosine-3'- phosphorothioate
  modified_base 2: mod_base = OTHER; note = 2'-fluoroguanosine-3'-phosphorothioate
  modified_base 3: mod_base = OTHER; note = 2'-O-methylcytidine-3'-phosphate
  modified_base 4: mod_base = OTHER; note = 2'-O-methyluridine-3'-phosphate
  modified_base 5: mod_base = OTHER; note = 2'-O-methylcytidine-3'-phosphate
  modified_base 6: mod_base = OTHER; note = 2'-fluorocytidine-3'-phosphate
  modified_base 7: mod_base = OTHER; note = 2'-O-methylguanosine-3'-phosphate
  modified_base 8: mod_base = OTHER; note = 2'-fluoroguanosine-3'-phosphate
  modified_base 9: mod_base = OTHER; note = 2'-fluorocytidine-3'-phosphate
  modified_base 10: mod_base = OTHER; note = 2'-O-methyluridine-3'-phosphate
  modified_base 11: mod_base = OTHER; note = 2'-O-methylcytidine-3'-phosphate
  modified_base 12: mod_base = OTHER; note = 2'-O-methyluridine-3'-phosphate
  modified_base 13: mod_base = OTHER; note = 2'-O-methylguanosine-3'-phosphate
  modified_base 14: mod_base = OTHER; note = 2'-fluorouridine-3'-phosphate
  modified_base 15: mod_base = OTHER; note = 2'-O-methylcytidine-3'-phosphate
  modified_base 16: mod_base = OTHER; note = 2'-fluorouridine-3'-phosphate
  modified_base 17: mod_base = OTHER; note = 2'-O-methylcytidine-3'-phosphate
  modified_base 18: mod_base = OTHER; note = 2'-O-methylcytidine-3'-phosphate
  modified_base 19: mod_base = OTHER; note = 2'-O-methyladenosine-3'-phosphate
  modified_base 20: mod_base = OTHER; note = 2'-O-methylcytidine-3'-phosphate
  modified_base 21: mod_base = OTHER; note = 2'-O-methylcytidine-3'- phosphorothioate
  modified_base 22: mod_base = OTHER; note = 2'-O-methylguanosine-3'- phosphorothioate
  modified_base 23: mod_base = OTHER; note = 2'-O-methylcytidine-3'-phosphate
agctccggctctgtctccaccgc

SEQ ID NO: 434 - RNA, 23 nt, synthetic construct
  source 1..23: mol_type = other RNA; note = Description of Artificial Sequence: Synthetic oligonucleotide
  modified_base 1: mod_base = OTHER; note = 2'-O-methyladenosine-3'- phosphorothioate
  modified_base 2: mod_base = OTHER; note = 2'-fluoroguanosine-3'-phosphorothioate
  modified_base 3: mod_base = OTHER; note = 2'-O-methyluridine-3'-phosphate
  modified_base 4: mod_base = OTHER; note = 2'-O-methylcytidine-3'-phosphate
  modified_base 5: mod_base = OTHER; note = 2'-O-methyluridine-3'-phosphate
  modified_base 6: mod_base = OTHER; note = 2'-fluoroguanosine-3'-phosphate
  modified_base 7: mod_base = OTHER; note = 2'-O-methylcytidine-3'-phosphate
  modified_base 8: mod_base = OTHER; note = 2'-fluorouridine-3'-phosphate
  modified_base 9: mod_base = OTHER; note = 2'-fluoroguanosine-3'-phosphate
  modified_base 10: mod_base = OTHER; note = 2'-O-methylguanosine-3'-phosphate
  modified_base 11: mod_base = OTHER; note = 2'-O-methylcytidine-3'-phosphate
  modified_base 12: mod_base = OTHER; note = 2'-O-methylguanosine-3'-phosphate
  modified_base 13: mod_base = OTHER; note = 2'-O-methylcytidine-3'-phosphate
  modified_base 14: mod_base = OTHER; note = 2'-fluoroadenosine-3'-phosphate
  modified_base 15: mod_base = OTHER; note = 2'-O-methylguanosine-3'-phosphate
  modified_base 16: mod_base = OTHER; note = 2'-fluorocytidine-3'-phosphate
  modified_base 17: mod_base = OTHER; note = 2'-O-methyluridine-3'-phosphate
  modified_base 18: mod_base = OTHER; note = 2'-O-methylcytidine-3'-phosphate
  modified_base 19: mod_base = OTHER; note = 2'-O-methylguanosine-3'-phosphate
  modified_base 20: mod_base = OTHER; note = 2'-O-methylguanosine-3'-phosphate
  modified_base 21: mod_base = OTHER; note = 2'-O-methylguanosine-3'- phosphorothioate
  modified_base 22: mod_base = OTHER; note = 2'-O-methylcytidine-3'- phosphorothioate
  modified_base 23: mod_base = OTHER; note = 2'-O-methyluridine-3'-phosphate
agtctgctggcgcagctcgggct

SEQ ID NO: 435 - RNA, 23 nt, synthetic construct
  source 1..23: mol_type = other RNA; note = Description of Artificial Sequence: Synthetic oligonucleotide
  modified_base 1: mod_base = OTHER; note = 2'-O-methyladenosine-3'- phosphorothioate
  modified_base 2: mod_base = OTHER; note = 2'-fluoroadenosine-3'-phosphorothioate
  modified_base 3: mod_base = OTHER; note = 2'-O-methylcytidine-3'-phosphate
  modified_base 4: mod_base = OTHER; note = 2'-O-methyluridine-3'-phosphate
  modified_base 5: mod_base = OTHER; note = 2'-O-methylcytidine-3'-phosphate
  modified_base 6: mod_base = OTHER; note = 2'-fluoroguanosine-3'-phosphate
  modified_base 7: mod_base = OTHER; note = 2'-O-methylguanosine-3'-phosphate
  modified_base 8: mod_base = OTHER; note = 2'-fluorouridine-3'-phosphate
  modified_base 9: mod_base = OTHER; note = 2'-fluorocytidine-3'-phosphate
  modified_base 10: mod_base = OTHER; note = 2'-O-methyluridine-3'-phosphate
  modified_base 11: mod_base = OTHER; note = 2'-O-methylguanosine-3'-phosphate
  modified_base 12: mod_base = OTHER; note = 2'-O-methylcytidine-3'-phosphate
  modified_base 13: mod_base = OTHER; note = 2'-O-methyluridine-3'-phosphate
  modified_base 14: mod_base = OTHER; note = 2'-fluoroguanosine-3'-phosphate
  modified_base 15: mod_base = OTHER; note = 2'-O-methylguanosine-3'-phosphate
  modified_base 16: mod_base = OTHER; note = 2'-fluorocytidine-3'-phosphate
  modified_base 17: mod_base = OTHER; note = 2'-O-methylguanosine-3'-phosphate
  modified_base 18: mod_base = OTHER; note = 2'-O-methylcytidine-3'-phosphate
  modified_base 19: mod_base = OTHER; note = 2'-O-methyladenosine-3'-phosphate
  modified_base 20: mod_base = OTHER; note = 2'-O-methylguanosine-3'-phosphate
  modified_base 21: mod_base = OTHER; note = 2'-O-methylcytidine-3'- phosphorothioate
  modified_base 22: mod_base = OTHER; note = 2'-O-methyluridine-3'-phosphorothioate
  modified_base 23: mod_base = OTHER; note = 2'-O-methylcytidine-3'-phosphate
aactcggtctgctggcgcagctc

SEQ ID NO: 436 - RNA, 23 nt, synthetic construct
  source 1..23: mol_type = other RNA; note = Description of Artificial Sequence: Synthetic oligonucleotide
  modified_base 1: mod_base = OTHER; note = 2'-O-methyladenosine-3'- phosphorothioate
  modified_base 2: mod_base = OTHER; note = 2'-fluorouridine -3'-phosphorothioate
  modified_base 3: mod_base = OTHER; note = 2'-O-methylcytidine-3'-phosphate
  modified_base 4: mod_base = OTHER; note = 2'-O-methyluridine-3'-phosphate
  modified_base 5: mod_base = OTHER; note = 2'-O-methylguanosine-3'-phosphate
  modified_base 6: mod_base = OTHER; note = 2'-fluorocytidine-3'-phosphate
  modified_base 7: mod_base = OTHER; note = 2'-O-methylcytidine-3'-phosphate
  modified_base 8: mod_base = OTHER; note = 2'-fluoroadenosine-3'-phosphate
  modified_base 9: mod_base = OTHER; note = 2'-fluorocytidine-3'-phosphate
  modified_base 10: mod_base = OTHER; note = 2'-O-methyluridine-3'-phosphate
  modified_base 11: mod_base = OTHER; note = 2'-O-methylcytidine-3'-phosphate
  modified_base 12: mod_base = OTHER; note = 2'-O-methylguanosine-3'-phosphate
  modified_base 13: mod_base = OTHER; note = 2'-O-methylguanosine-3'-phosphate
  modified_base 14: mod_base = OTHER; note = 2'-fluorouridine-3'-phosphate
  modified_base 15: mod_base = OTHER; note = 2'-O-methylcytidine-3'-phosphate
  modified_base 16: mod_base = OTHER; note = 2'-fluorouridine-3'-phosphate
  modified_base 17: mod_base = OTHER; note = 2'-O-methylguanosine-3'-phosphate
  modified_base 18: mod_base = OTHER; note = 2'-O-methylcytidine-3'-phosphate
  modified_base 19: mod_base = OTHER; note = 2'-O-methyluridine-3'-phosphate
  modified_base 20: mod_base = OTHER; note = 2'-O-methylguanosine-3'-phosphate
  modified_base 21: mod_base = OTHER; note = 2'-O-methylguanosine-3'- phosphorothioate
  modified_base 22: mod_base = OTHER; note = 2'-O-methylcytidine-3'- phosphorothioate
  modified_base 23: mod_base = OTHER; note = 2'-O-methylguanosine-3'-phosphate
atctgccactcggtctgctggcg

SEQ ID NO: 437 - RNA, 23 nt, synthetic construct
  source 1..23: mol_type = other RNA; note = Description of Artificial Sequence: Synthetic oligonucleotide
  modified_base 1: mod_base = OTHER; note = 2'-O-methyladenosine-3'- phosphorothioate
  modified_base 2: mod_base = OTHER; note = 2'-fluoroadenosine-3'-phosphorothioate
  modified_base 3: mod_base = OTHER; note = 2'-O-methylguanosine-3'-phosphate
  modified_base 4: mod_base = OTHER; note = 2'-O-methyluridine-3'-phosphate
  modified_base 5: mod_base = OTHER; note = 2'-O-methylguanosine-3'-phosphate
  modified_base 6: mod_base = OTHER; note = 2'-fluorocytidine-3'-phosphate
  modified_base 7: mod_base = OTHER; note = 2'-O-methylcytidine-3'-phosphate
  modified_base 8: mod_base = OTHER; note = 2'-fluoroadenosine-3'-phosphate
  modified_base 9: mod_base = OTHER; note = 2'-fluoroguanosine-3'-phosphate
  modified_base 10: mod_base = OTHER; note = 2'-O-methyluridine-3'-phosphate
  modified_base 11: mod_base = OTHER; note = 2'-O-methyluridine-3'-phosphate
  modified_base 12: mod_base = OTHER; note = 2'-O-methylcytidine-3'-phosphate
  modified_base 13: mod_base = OTHER; note = 2'-O-methylcytidine-3'-phosphate
  modified_base 14: mod_base = OTHER; note = 2'-fluorocytidine-3'-phosphate
  modified_base 15: mod_base = OTHER; note = 2'-O-methyladenosine-3'-phosphate
  modified_base 16: mod_base = OTHER; note = 2'-fluoroguanosine-3'-phosphate
  modified_base 17: mod_base = OTHER; note = 2'-O-methylcytidine-3'-phosphate
  modified_base 18: mod_base = OTHER; note = 2'-O-methylguanosine-3'-phosphate
  modified_base 19: mod_base = OTHER; note = 2'-O-methylcytidine-3'-phosphate
  modified_base 20: mod_base = OTHER; note = 2'-O-methyluridine-3'-phosphate
  modified_base 21: mod_base = OTHER; note = 2'-O-methylguanosine-3'- phosphorothioate
  modified_base 22: mod_base = OTHER; note = 2'-O-methylguanosine-3'- phosphorothioate
  modified_base 23: mod_base = OTHER; note = 2'-O-methylcytidine-3'-phosphate
aagtgccagttcccagcgctggc

SEQ ID NO: 438 - RNA, 23 nt, synthetic construct
  source 1..23: mol_type = other RNA; note = Description of Artificial Sequence: Synthetic oligonucleotide
  modified_base 1: mod_base = OTHER; note = 2'-O-methyladenosine-3'- phosphorothioate
  modified_base 2: mod_base = OTHER; note = 2'-fluoroguanosine-3'-phosphorothioate
  modified_base 3: mod_base = OTHER; note = 2'-O-methyladenosine-3'-phosphate
  modified_base 4: mod_base = OTHER; note = 2'-O-methylcytidine-3'-phosphate
  modified_base 5: mod_base = OTHER; note = 2'-O-methylcytidine-3'-phosphate
  modified_base 6: mod_base = OTHER; note = 2'-fluorocytidine-3'-phosphate
  modified_base 7: mod_base = OTHER; note = 2'-O-methyladenosine-3'-phosphate
  modified_base 8: mod_base = OTHER; note = 2'-fluoroguanosine-3'-phosphate
  modified_base 9: mod_base = OTHER; note = 2'-fluorouridine-3'-phosphate
  modified_base 10: mod_base = OTHER; note = 2'-O-methylguanosine-3'-phosphate
  modified_base 11: mod_base = OTHER; note = 2'-O-methylcytidine-3'-phosphate
  modified_base 12: mod_base = OTHER; note = 2'-O-methylcytidine-3'-phosphate
  modified_base 13: mod_base = OTHER; note = 2'-O-methyladenosine-3'-phosphate
  modified_base 14: mod_base = OTHER; note = 2'-fluoroguanosine-3'-phosphate
  modified_base 15: mod_base = OTHER; note = 2'-O-methyluridine-3'-phosphate
  modified_base 16: mod_base = OTHER; note = 2'-fluorouridine-3'-phosphate
  modified_base 17: mod_base = OTHER; note = 2'-O-methylcytidine-3'-phosphate
  modified_base 18: mod_base = OTHER; note = 2'-O-methylcytidine-3'-phosphate
  modified_base 19: mod_base = OTHER; note = 2'-O-methylcytidine-3'-phosphate
  modified_base 20: mod_base = OTHER; note = 2'-O-methyladenosine-3'-phosphate
  modified_base 21: mod_base = OTHER; note = 2'-O-methylguanosine-3'- phosphorothioate
  modified_base 22: mod_base = OTHER; note = 2'-O-methylcytidine-3'- phosphorothioate
  modified_base 23: mod_base = OTHER; note = 2'-O-methylguanosine-3'-phosphate
agacccagtgccagttcccagcg

SEQ ID NO: 439 - RNA, 23 nt, synthetic construct
  source 1..23: mol_type = other RNA; note = Description of Artificial Sequence: Synthetic oligonucleotide
  modified_base 1: mod_base = OTHER; note = 2'-O-methyladenosine-3'- phosphorothioate
  modified_base 2: mod_base = OTHER; note = 2'-fluoroadenosine-3'-phosphorothioate
  modified_base 3: mod_base = OTHER; note = 2'-O-methyladenosine-3'-phosphate
  modified_base 4: mod_base = OTHER; note = 2'-O-methyladenosine-3'-phosphate
  modified_base 5: mod_base = OTHER; note = 2'-O-methylguanosine-3'-phosphate
  modified_base 6: mod_base = OTHER; note = 2'-fluorocytidine-3'-phosphate
  modified_base 7: mod_base = OTHER; note = 2'-O-methylguanosine-3'-phosphate
  modified_base 8: mod_base = OTHER; note = 2'-fluoroadenosine-3'-phosphate
  modified_base 9: mod_base = OTHER; note = 2'-fluorocytidine-3'-phosphate
  modified_base 10: mod_base = OTHER; note = 2'-O-methylcytidine-3'-phosphate
  modified_base 11: mod_base = OTHER; note = 2'-O-methylcytidine-3'-phosphate
  modified_base 12: mod_base = OTHER; note = 2'-O-methyladenosine-3'-phosphate
  modified_base 13: mod_base = OTHER; note = 2'-O-methylguanosine-3'-phosphate
  modified_base 14: mod_base = OTHER; note = 2'-fluorouridine-3'-phosphate
  modified_base 15: mod_base = OTHER; note = 2'-O-methylguanosine-3'-phosphate
  modified_base 16: mod_base = OTHER; note = 2'-fluorocytidine-3'-phosphate
  modified_base 17: mod_base = OTHER; note = 2'-O-methylcytidine-3'-phosphate
  modified_base 18: mod_base = OTHER; note = 2'-O-methyladenosine-3'-phosphate
  modified_base 19: mod_base = OTHER; note = 2'-O-methylguanosine-3'-phosphate
  modified_base 20: mod_base = OTHER; note = 2'-O-methyluridine-3'-phosphate
  modified_base 21: mod_base = OTHER; note = 2'-O-methyluridine-3'-phosphorothioate
  modified_base 22: mod_base = OTHER; note = 2'-O-methylcytidine-3'- phosphorothioate
  modified_base 23: mod_base = OTHER; note = 2'-O-methylcytidine-3'-phosphate
aaaagcgacccagtgccagttcc

SEQ ID NO: 440 - RNA, 23 nt, synthetic construct
  source 1..23: mol_type = other RNA; note = Description of Artificial Sequence: Synthetic oligonucleotide
  modified_base 1: mod_base = OTHER; note = 2'-O-methyladenosine-3'- phosphorothioate
  modified_base 2: mod_base = OTHER; note = 2'-fluoroadenosine-3'-phosphorothioate
  modified_base 3: mod_base = OTHER; note = 2'-O-methyluridine-3'-phosphate
  modified_base 4: mod_base = OTHER; note = 2'-O-methylcytidine-3'-phosphate
  modified_base 5: mod_base = OTHER; note = 2'-O-methylcytidine-3'-phosphate
  modified_base 6: mod_base = OTHER; note = 2'-fluorocytidine-3'-phosphate
  modified_base 7: mod_base = OTHER; note = 2'-O-methyladenosine-3'-phosphate
  modified_base 8: mod_base = OTHER; note = 2'-fluoroadenosine-3'-phosphate
  modified_base 9: mod_base = OTHER; note = 2'-fluoroadenosine-3'-phosphate
  modified_base 10: mod_base = OTHER; note = 2'-O-methyladenosine-3'-phosphate
  modified_base 11: mod_base = OTHER; note = 2'-O-methylguanosine-3'-phosphate
  modified_base 12: mod_base = OTHER; note = 2'-O-methylcytidine-3'-phosphate
  modified_base 13: mod_base = OTHER; note = 2'-O-methylguanosine-3'-phosphate
  modified_base 14: mod_base = OTHER; note = 2'-fluoroadenosine-3'-phosphate
  modified_base 15: mod_base = OTHER; note = 2'-O-methylcytidine-3'-phosphate
  modified_base 16: mod_base = OTHER; note = 2'-fluorocytidine-3'-phosphate
  modified_base 17: mod_base = OTHER; note = 2'-O-methylcytidine-3'-phosphate
  modified_base 18: mod_base = OTHER; note = 2'-O-methyladenosine-3'-phosphate
  modified_base 19: mod_base = OTHER; note = 2'-O-methylguanosine-3'-phosphate
  modified_base 20: mod_base = OTHER; note = 2'-O-methyluridine-3'-phosphate
  modified_base 21: mod_base = OTHER; note = 2'-O-methylguanosine-3'- phosphorothioate
  modified_base 22: mod_base = OTHER; note = 2'-O-methylcytidine-3'- phosphorothioate
  modified_base 23: mod_base = OTHER; note = 2'-O-methylcytidine-3'-phosphate
aatcccaaaagcgacccagtgcc

SEQ ID NO: 441 - RNA, 23 nt, synthetic construct
  source 1..23: mol_type = other RNA; note = Description of Artificial Sequence: Synthetic oligonucleotide
  modified_base 1: mod_base = OTHER; note = 2'-O-methyladenosine-3'- phosphorothioate
  modified_base 2: mod_base = OTHER; note = 2'-fluorocytidine-3'-phosphorothioate
  modified_base 3: mod_base = OTHER; note = 2'-O-methyladenosine-3'-phosphate
  modified_base 4: mod_base = OTHER; note = 2'-O-methylguanosine-3'-phosphate
  modified_base 5: mod_base = OTHER; note = 2'-O-methylguanosine-3'-phosphate
  modified_base 6: mod_base = OTHER; note = 2'-fluorouridine-3'-phosphate
  modified_base 7: mod_base = OTHER; note = 2'-O-methyladenosine-3'-phosphate
  modified_base 8: mod_base = OTHER; note = 2'-fluoroadenosine-3'-phosphate
  modified_base 9: mod_base = OTHER; note = 2'-fluorouridine-3'-phosphate
  modified_base 10: mod_base = OTHER; note = 2'-O-methylcytidine-3'-phosphate
  modified_base 11: mod_base = OTHER; note = 2'-O-methylcytidine-3'-phosphate
  modified_base 12: mod_base = OTHER; note = 2'-O-methylcytidine-3'-phosphate
  modified_base 13: mod_base = OTHER; note = 2'-O-methyladenosine-3'-phosphate
  modified_base 14: mod_base = OTHER; note = 2'-fluoroadenosine-3'-phosphate
  modified_base 15: mod_base = OTHER; note = 2'-O-methyladenosine-3'-phosphate
  modified_base 16: mod_base = OTHER; note = 2'-fluoroadenosine-3'-phosphate
  modified_base 17: mod_base = OTHER; note = 2'-O-methylguanosine-3'-phosphate
  modified_base 18: mod_base = OTHER; note = 2'-O-methylcytidine-3'-phosphate
  modified_base 19: mod_base = OTHER; note = 2'-O-methylguanosine-3'-phosphate
  modified_base 20: mod_base = OTHER; note = 2'-O-methyladenosine-3'-phosphate
  modified_base 21: mod_base = OTHER; note = 2'-O-methylcytidine-3'- phosphorothioate
  modified_base 22: mod_base = OTHER; note = 2'-O-methylcytidine-3'- phosphorothioate
  modified_base 23: mod_base = OTHER; note = 2'-O-methylcytidine-3'-phosphate
acaggtaatcccaaaagcgaccc

SEQ ID NO: 442 - RNA, 23 nt, synthetic construct
  source 1..23: mol_type = other RNA; note = Description of Artificial Sequence: Synthetic oligonucleotide
  modified_base 1: mod_base = OTHER; note = 2'-O-methyladenosine-3'- phosphorothioate
  modified_base 2: mod_base = OTHER; note = 2'-fluorocytidine-3'-phosphorothioate
  modified_base 3: mod_base = OTHER; note = 2'-O-methyladenosine-3'-phosphate
  modified_base 4: mod_base = OTHER; note = 2'-O-methylguanosine-3'-phosphate
  modified_base 5: mod_base = OTHER; note = 2'-O-methylcytidine-3'-phosphate
  modified_base 6: mod_base = OTHER; note = 2'-fluoroguanosine-3'-phosphate
  modified_base 7: mod_base = OTHER; note = 2'-O-methylcytidine-3'-phosphate
  modified_base 8: mod_base = OTHER; note = 2'-fluoroadenosine-3'-phosphate
  modified_base 9: mod_base = OTHER; note = 2'-fluoroguanosine-3'-phosphate
  modified_base 10: mod_base = OTHER; note = 2'-O-methylguanosine-3'-phosphate
  modified_base 11: mod_base = OTHER; note = 2'-O-methyluridine-3'-phosphate
  modified_base 12: mod_base = OTHER; note = 2'-O-methyladenosine-3'-phosphate
  modified_base 13: mod_base = OTHER; note = 2'-O-methyladenosine-3'-phosphate
  modified_base 14: mod_base = OTHER; note = 2'-fluorouridine-3'-phosphate
  modified_base 15: mod_base = OTHER; note = 2'-O-methylcytidine-3'-phosphate
  modified_base 16: mod_base = OTHER; note = 2'-fluorocytidine-3'-phosphate
  modified_base 17: mod_base = OTHER; note = 2'-O-methylcytidine-3'-phosphate
  modified_base 18: mod_base = OTHER; note = 2'-O-methyladenosine-3'-phosphate
  modified_base 19: mod_base = OTHER; note = 2'-O-methyladenosine-3'-phosphate
  modified_base 20: mod_base = OTHER; note = 2'-O-methyladenosine-3'-phosphate
  modified_base 21: mod_base = OTHER; note = 2'-O-methyladenosine-3'- phosphorothioate
  modified_base 22: mod_base = OTHER; note = 2'-O-methylguanosine-3'- phosphorothioate
  modified_base 23: mod_base = OTHER; note = 2'-O-methylcytidine-3'-phosphate
acagcgcaggtaatcccaaaagc

SEQ ID NO: 443 - RNA, 23 nt, synthetic construct
  source 1..23: mol_type = other RNA; note = Description of Artificial Sequence: Synthetic oligonucleotide
  modified_base 1: mod_base = OTHER; note = 2'-O-methyladenosine-3'- phosphorothioate
  modified_base 2: mod_base = OTHER; note = 2'-fluoroadenosine-3'-phosphorothioate
  modified_base 3: mod_base = OTHER; note = 2'-O-methylguanosine-3'-phosphate
  modified_base 4: mod_base = OTHER; note = 2'-O-methyluridine-3'-phosphate
  modified_base 5: mod_base = OTHER; note = 2'-O-methylguanosine-3'-phosphate
  modified_base 6: mod_base = OTHER; note = 2'-fluorouridine-3'-phosphate
  modified_base 7: mod_base = OTHER; note = 2'-O-methylcytidine-3'-phosphate
  modified_base 8: mod_base = OTHER; note = 2'-fluorouridine-3'-phosphate
  modified_base 9: mod_base = OTHER; note = 2'-fluoroguanosine-3'-phosphate
  modified_base 10: mod_base = OTHER; note = 2'-O-methylcytidine-3'-phosphate
  modified_base 11: mod_base = OTHER; note = 2'-O-methyladenosine-3'-phosphate
  modified_base 12: mod_base = OTHER; note = 2'-O-methylcytidine-3'-phosphate
  modified_base 13: mod_base = OTHER; note = 2'-O-methylcytidine-3'-phosphate
  modified_base 14: mod_base = OTHER; note = 2'-fluorocytidine-3'-phosphate
  modified_base 15: mod_base = OTHER; note = 2'-O-methyladenosine-3'-phosphate
  modified_base 16: mod_base = OTHER; note = 2'-fluoroguanosine-3'-phosphate
  modified_base 17: mod_base = OTHER; note = 2'-O-methylcytidine-3'-phosphate
  modified_base 18: mod_base = OTHER; note = 2'-O-methylguanosine-3'-phosphate
  modified_base 19: mod_base = OTHER; note = 2'-O-methylcytidine-3'-phosphate
  modified_base 20: mod_base = OTHER; note = 2'-O-methyladenosine-3'-phosphate
  modified_base 21: mod_base = OTHER; note = 2'-O-methylguanosine-3'- phosphorothioate
  modified_base 22: mod_base = OTHER; note = 2'-O-methylguanosine-3'- phosphorothioate
  modified_base 23: mod_base = OTHER; note = 2'-O-methyluridine-3'-phosphate
aagtgtctgcacccagcgcaggt

SEQ ID NO: 444 - RNA, 23 nt, synthetic construct
  source 1..23: mol_type = other RNA; note = Description of Artificial Sequence: Synthetic oligonucleotide
  modified_base 1: mod_base = OTHER; note = 2'-O-methyladenosine-3'- phosphorothioate
  modified_base 2: mod_base = OTHER; note = 2'-fluorouridine -3'-phosphorothioate
  modified_base 3: mod_base = OTHER; note = 2'-O-methylcytidine-3'-phosphate
  modified_base 4: mod_base = OTHER; note = 2'-O-methyladenosine-3'-phosphate
  modified_base 5: mod_base = OTHER; note = 2'-O-methylguanosine-3'-phosphate
  modified_base 6: mod_base = OTHER; note = 2'-fluoroadenosine-3'-phosphate
  modified_base 7: mod_base = OTHER; note = 2'-O-methylcytidine-3'-phosphate
  modified_base 8: mod_base = OTHER; note = 2'-fluoroadenosine-3'-phosphate
  modified_base 9: mod_base = OTHER; note = 2'-fluoroguanosine-3'-phosphate
  modified_base 10: mod_base = OTHER; note = 2'-O-methyluridine-3'-phosphate
  modified_base 11: mod_base = OTHER; note = 2'-O-methylguanosine-3'-phosphate
  modified_base 12: mod_base = OTHER; note = 2'-O-methyluridine-3'-phosphate
  modified_base 13: mod_base = OTHER; note = 2'-O-methylcytidine-3'-phosphate
  modified_base 14: mod_base = OTHER; note = 2'-fluorouridine-3'-phosphate
  modified_base 15: mod_base = OTHER; note = 2'-O-methylguanosine-3'-phosphate
  modified_base 16: mod_base = OTHER; note = 2'-fluorocytidine-3'-phosphate
  modified_base 17: mod_base = OTHER; note = 2'-O-methyladenosine-3'-phosphate
  modified_base 18: mod_base = OTHER; note = 2'-O-methylcytidine-3'-phosphate
  modified_base 19: mod_base = OTHER; note = 2'-O-methylcytidine-3'-phosphate
  modified_base 20: mod_base = OTHER; note = 2'-O-methylcytidine-3'-phosphate
  modified_base 21: mod_base = OTHER; note = 2'-O-methyladenosine-3'- phosphorothioate
  modified_base 22: mod_base = OTHER; note = 2'-O-methylguanosine-3'- phosphorothioate
  modified_base 23: mod_base = OTHER; note = 2'-O-methylcytidine-3'-phosphate
atcagacagtgtctgcacccagc

SEQ ID NO: 445 - RNA, 23 nt, synthetic construct
  source 1..23: mol_type = other RNA; note = Description of Artificial Sequence: Synthetic oligonucleotide
  modified_base 1: mod_base = OTHER; note = 2'-O-methyladenosine-3'- phosphorothioate
  modified_base 2: mod_base = OTHER; note = 2'-fluoroadenosine-3'-phosphorothioate
  modified_base 3: mod_base = OTHER; note = 2'-O-methylcytidine-3'-phosphate
  modified_base 4: mod_base = OTHER; note = 2'-O-methylcytidine-3'-phosphate
  modified_base 5: mod_base = OTHER; note = 2'-O-methyluridine-3'-phosphate
  modified_base 6: mod_base = OTHER; note = 2'-fluoroguanosine-3'-phosphate
  modified_base 7: mod_base = OTHER; note = 2'-O-methylcytidine-3'-phosphate
  modified_base 8: mod_base = OTHER; note = 2'-fluorouridine-3'-phosphate
  modified_base 9: mod_base = OTHER; note = 2'-fluorocytidine-3'-phosphate
  modified_base 10: mod_base = OTHER; note = 2'-O-methyladenosine-3'-phosphate
  modified_base 11: mod_base = OTHER; note = 2'-O-methylguanosine-3'-phosphate
  modified_base 12: mod_base = OTHER; note = 2'-O-methyladenosine-3'-phosphate
  modified_base 13: mod_base = OTHER; note = 2'-O-methylcytidine-3'-phosphate
  modified_base 14: mod_base = OTHER; note = 2'-fluoroadenosine-3'-phosphate
  modified_base 15: mod_base = OTHER; note = 2'-O-methylguanosine-3'-phosphate
  modified_base 16: mod_base = OTHER; note = 2'-fluorouridine-3'-phosphate
  modified_base 17: mod_base = OTHER; note = 2'-O-methylguanosine-3'-phosphate
  modified_base 18: mod_base = OTHER; note = 2'-O-methyluridine-3'-phosphate
  modified_base 19: mod_base = OTHER; note = 2'-O-methylcytidine-3'-phosphate
  modified_base 20: mod_base = OTHER; note = 2'-O-methyluridine-3'-phosphate
  modified_base 21: mod_base = OTHER; note = 2'-O-methylguanosine-3'- phosphorothioate
  modified_base 22: mod_base = OTHER; note = 2'-O-methylcytidine-3'- phosphorothioate
  modified_base 23: mod_base = OTHER; note = 2'-O-methyladenosine-3'-phosphate
aacctgctcagacagtgtctgca

SEQ ID NO: 446 - RNA, 23 nt, synthetic construct
  source 1..23: mol_type = other RNA; note = Description of Artificial Sequence: Synthetic oligonucleotide
  modified_base 1: mod_base = OTHER; note = 2'-O-methyladenosine-3'- phosphorothioate
  modified_base 2: mod_base = OTHER; note = 2'-fluoroguanosine-3'-phosphorothioate
  modified_base 3: mod_base = OTHER; note = 2'-O-methyladenosine-3'-phosphate
  modified_base 4: mod_base = OTHER; note = 2'-O-methylguanosine-3'-phosphate
  modified_base 5: mod_base = OTHER; note = 2'-O-methylcytidine-3'-phosphate
  modified_base 6: mod_base = OTHER; note = 2'-fluorouridine-3'-phosphate
  modified_base 7: mod_base = OTHER; note = 2'-O-methylguanosine-3'-phosphate
  modified_base 8: mod_base = OTHER; note = 2'-fluoroadenosine-3'-phosphate
  modified_base 9: mod_base = OTHER; note = 2'-fluoroguanosine-3'-phosphate
  modified_base 10: mod_base = OTHER; note = 2'-O-methylcytidine-3'-phosphate
  modified_base 11: mod_base = OTHER; note = 2'-O-methyladenosine-3'-phosphate
  modified_base 12: mod_base = OTHER; note = 2'-O-methylguanosine-3'-phosphate
  modified_base 13: mod_base = OTHER; note = 2'-O-methylcytidine-3'-phosphate
  modified_base 14: mod_base = OTHER; note = 2'-fluorouridine-3'-phosphate
  modified_base 15: mod_base = OTHER; note = 2'-O-methylcytidine-3'-phosphate
  modified_base 16: mod_base = OTHER; note = 2'-fluorocytidine-3'-phosphate
  modified_base 17: mod_base = OTHER; note = 2'-O-methyluridine-3'-phosphate
  modified_base 18: mod_base = OTHER; note = 2'-O-methylcytidine-3'-phosphate
  modified_base 19: mod_base = OTHER; note = 2'-O-methylcytidine-3'-phosphate
  modified_base 20: mod_base = OTHER; note = 2'-O-methyluridine-3'-phosphate
  modified_base 21: mod_base = OTHER; note = 2'-O-methylguanosine-3'- phosphorothioate
  modified_base 22: mod_base = OTHER; note = 2'-O-methylcytidine-3'- phosphorothioate
  modified_base 23: mod_base = OTHER; note = 2'-O-methyladenosine-3'-phosphate
agagctgagcagctcctcctgca

SEQ ID NO: 447 - RNA, 23 nt, synthetic construct
  source 1..23: mol_type = other RNA; note = Description of Artificial Sequence: Synthetic oligonucleotide
  modified_base 1: mod_base = OTHER; note = 2'-O-methyladenosine-3'- phosphorothioate
  modified_base 2: mod_base = OTHER; note = 2'-fluoroguanosine-3'-phosphorothioate
  modified_base 3: mod_base = OTHER; note = 2'-O-methyluridine-3'-phosphate
  modified_base 4: mod_base = OTHER; note = 2'-O-methylguanosine-3'-phosphate
  modified_base 5: mod_base = OTHER; note = 2'-O-methyladenosine-3'-phosphate
  modified_base 6: mod_base = OTHER; note = 2'-fluorocytidine-3'-phosphate
  modified_base 7: mod_base = OTHER; note = 2'-O-methylcytidine-3'-phosphate
  modified_base 8: mod_base = OTHER; note = 2'-fluorouridine-3'-phosphate
  modified_base 9: mod_base = OTHER; note = 2'-fluoroguanosine-3'-phosphate
  modified_base 10: mod_base = OTHER; note = 2'-O-methylguanosine-3'-phosphate
  modified_base 11: mod_base = OTHER; note = 2'-O-methylguanosine-3'-phosphate
  modified_base 12: mod_base = OTHER; note = 2'-O-methyladenosine-3'-phosphate
  modified_base 13: mod_base = OTHER; note = 2'-O-methylguanosine-3'-phosphate
  modified_base 14: mod_base = OTHER; note = 2'-fluorocytidine-3'-phosphate
  modified_base 15: mod_base = OTHER; note = 2'-O-methyluridine-3'-phosphate
  modified_base 16: mod_base = OTHER; note = 2'-fluoroguanosine-3'-phosphate
  modified_base 17: mod_base = OTHER; note = 2'-O-methyladenosine-3'-phosphate
  modified_base 18: mod_base = OTHER; note = 2'-O-methylguanosine-3'-phosphate
  modified_base 19: mod_base = OTHER; note = 2'-O-methylcytidine-3'-phosphate
  modified_base 20: mod_base = OTHER; note = 2'-O-methyladenosine-3'-phosphate
  modified_base 21: mod_base = OTHER; note = 2'-O-methylguanosine-3'- phosphorothioate
  modified_base 22: mod_base = OTHER; note = 2'-O-methylcytidine-3'- phosphorothioate
  modified_base 23: mod_base = OTHER; note = 2'-O-methyluridine-3'-phosphate
agtgacctgggagctgagcagct

SEQ ID NO: 448 - RNA, 23 nt, synthetic construct
  source 1..23: mol_type = other RNA; note = Description of Artificial Sequence: Synthetic oligonucleotide
  modified_base 1: mod_base = OTHER; note = 2'-O-methyladenosine-3'- phosphorothioate
  modified_base 2: mod_base = OTHER; note = 2'-fluoroadenosine-3'-phosphorothioate
  modified_base 3: mod_base = OTHER; note = 2'-O-methylguanosine-3'-phosphate
  modified_base 4: mod_base = OTHER; note = 2'-O-methyluridine-3'-phosphate
  modified_base 5: mod_base = OTHER; note = 2'-O-methyluridine-3'-phosphate
  modified_base 6: mod_base = OTHER; note = 2'-fluorocytidine-3'-phosphate
  modified_base 7: mod_base = OTHER; note = 2'-O-methylcytidine-3'-phosphate
  modified_base 8: mod_base = OTHER; note = 2'-fluorouridine-3'-phosphate
  modified_base 9: mod_base = OTHER; note = 2'-fluoroguanosine-3'-phosphate
  modified_base 10: mod_base = OTHER; note = 2'-O-methylguanosine-3'-phosphate
  modified_base 11: mod_base = OTHER; note = 2'-O-methylguanosine-3'-phosphate
  modified_base 12: mod_base = OTHER; note = 2'-O-methyluridine-3'-phosphate
  modified_base 13: mod_base = OTHER; note = 2'-O-methylguanosine-3'-phosphate
  modified_base 14: mod_base = OTHER; note = 2'-fluoroadenosine-3'-phosphate
  modified_base 15: mod_base = OTHER; note = 2'-O-methylcytidine-3'-phosphate
  modified_base 16: mod_base = OTHER; note = 2'-fluorocytidine-3'-phosphate
  modified_base 17: mod_base = OTHER; note = 2'-O-methyluridine-3'-phosphate
  modified_base 18: mod_base = OTHER; note = 2'-O-methylguanosine-3'-phosphate
  modified_base 19: mod_base = OTHER; note = 2'-O-methylguanosine-3'-phosphate
  modified_base 20: mod_base = OTHER; note = 2'-O-methylguanosine-3'-phosphate
  modified_base 21: mod_base = OTHER; note = 2'-O-methyladenosine-3'- phosphorothioate
  modified_base 22: mod_base = OTHER; note = 2'-O-methylguanosine-3'- phosphorothioate
  modified_base 23: mod_base = OTHER; note = 2'-O-methylcytidine-3'-phosphate
aagttcctgggtgacctgggagc

SEQ ID NO: 449 - RNA, 23 nt, synthetic construct
  source 1..23: mol_type = other RNA; note = Description of Artificial Sequence: Synthetic oligonucleotide
  modified_base 1: mod_base = OTHER; note = 2'-O-methyladenosine-3'- phosphorothioate
  modified_base 2: mod_base = OTHER; note = 2'-fluoroadenosine-3'-phosphorothioate
  modified_base 3: mod_base = OTHER; note = 2'-O-methylguanosine-3'-phosphate
  modified_base 4: mod_base = OTHER; note = 2'-O-methylcytidine-3'-phosphate
  modified_base 5: mod_base = OTHER; note = 2'-O-methylguanosine-3'-phosphate
  modified_base 6: mod_base = OTHER; note = 2'-fluorocytidine-3'-phosphate
  modified_base 7: mod_base = OTHER; note = 2'-O-methylcytidine-3'-phosphate
  modified_base 8: mod_base = OTHER; note = 2'-fluorocytidine-3'-phosphate
  modified_base 9: mod_base = OTHER; note = 2'-fluorouridine-3'-phosphate
  modified_base 10: mod_base = OTHER; note = 2'-O-methylcytidine-3'-phosphate
  modified_base 11: mod_base = OTHER; note = 2'-O-methyladenosine-3'-phosphate
  modified_base 12: mod_base = OTHER; note = 2'-O-methylguanosine-3'-phosphate
  modified_base 13: mod_base = OTHER; note = 2'-O-methyluridine-3'-phosphate
  modified_base 14: mod_base = OTHER; note = 2'-fluorouridine-3'-phosphate
  modified_base 15: mod_base = OTHER; note = 2'-O-methylcytidine-3'-phosphate
  modified_base 16: mod_base = OTHER; note = 2'-fluorocytidine-3'-phosphate
  modified_base 17: mod_base = OTHER; note = 2'-O-methyluridine-3'-phosphate
  modified_base 18: mod_base = OTHER; note = 2'-O-methylguanosine-3'-phosphate
  modified_base 19: mod_base = OTHER; note = 2'-O-methylguanosine-3'-phosphate
  modified_base 20: mod_base = OTHER; note = 2'-O-methylguanosine-3'-phosphate
  modified_base 21: mod_base = OTHER; note = 2'-O-methyluridine-3'-phosphorothioate
  modified_base 22: mod_base = OTHER; note = 2'-O-methylguanosine-3'- phosphorothioate
  modified_base 23: mod_base = OTHER; note = 2'-O-methyladenosine-3'-phosphate
aagcgccctcagttcctgggtga

SEQ ID NO: 450 - RNA, 23 nt, synthetic construct
  source 1..23: mol_type = other RNA; note = Description of Artificial Sequence: Synthetic oligonucleotide
  modified_base 1: mod_base = OTHER; note = 2'-O-methyladenosine-3'- phosphorothioate
  modified_base 2: mod_base = OTHER; note = 2'-fluorocytidine-3'-phosphorothioate
  modified_base 3: mod_base = OTHER; note = 2'-O-methyluridine-3'-phosphate
  modified_base 4: mod_base = OTHER; note = 2'-O-methylcytidine-3'-phosphate
  modified_base 5: mod_base = OTHER; note = 2'-O-methylguanosine-3'-phosphate
  modified_base 6: mod_base = OTHER; note = 2'-fluorouridine-3'-phosphate
  modified_base 7: mod_base = OTHER; note = 2'-O-methylcytidine-3'-phosphate
  modified_base 8: mod_base = OTHER; note = 2'-fluorocytidine-3'-phosphate
  modified_base 9: mod_base = OTHER; note = 2'-fluoroadenosine-3'-phosphate
  modified_base 10: mod_base = OTHER; note = 2'-O-methyluridine-3'-phosphate
  modified_base 11: mod_base = OTHER; note = 2'-O-methylcytidine-3'-phosphate
  modified_base 12: mod_base = OTHER; note = 2'-O-methyladenosine-3'-phosphate
  modified_base 13: mod_base = OTHER; note = 2'-O-methylguanosine-3'-phosphate
  modified_base 14: mod_base = OTHER; note = 2'-fluorocytidine-3'-phosphate
  modified_base 15: mod_base = OTHER; note = 2'-O-methylguanosine-3'-phosphate
  modified_base 16: mod_base = OTHER; note = 2'-fluorocytidine-3'-phosphate
  modified_base 17: mod_base = OTHER; note = 2'-O-methylcytidine-3'-phosphate
  modified_base 18: mod_base = OTHER; note = 2'-O-methylcytidine-3'-phosphate
  modified_base 19: mod_base = OTHER; note = 2'-O-methyluridine-3'-phosphate
  modified_base 20: mod_base = OTHER; note = 2'-O-methylcytidine-3'-phosphate
  modified_base 21: mod_base = OTHER; note = 2'-O-methyladenosine-3'- phosphorothioate
  modified_base 22: mod_base = OTHER; note = 2'-O-methylguanosine-3'- phosphorothioate
  modified_base 23: mod_base = OTHER; note = 2'-O-methyluridine-3'-phosphate
actcgtccatcagcgccctcagt

SEQ ID NO: 451 - RNA, 23 nt, synthetic construct
  source 1..23: mol_type = other RNA; note = Description of Artificial Sequence: Synthetic oligonucleotide
  modified_base 1: mod_base = OTHER; note = 2'-O-methyladenosine-3'- phosphorothioate
  modified_base 2: mod_base = OTHER; note = 2'-fluoroadenosine-3'-phosphorothioate
  modified_base 3: mod_base = OTHER; note = 2'-O-methyluridine-3'-phosphate
  modified_base 4: mod_base = OTHER; note = 2'-O-methylguanosine-3'-phosphate
  modified_base 5: mod_base = OTHER; note = 2'-O-methylguanosine-3'-phosphate
  modified_base 6: mod_base = OTHER; note = 2'-fluorouridine-3'-phosphate
  modified_base 7: mod_base = OTHER; note = 2'-O-methylcytidine-3'-phosphate
  modified_base 8: mod_base = OTHER; note = 2'-fluorouridine-3'-phosphate
  modified_base 9: mod_base = OTHER; note = 2'-fluorocytidine-3'-phosphate
  modified_base 10: mod_base = OTHER; note = 2'-O-methylguanosine-3'-phosphate
  modified_base 11: mod_base = OTHER; note = 2'-O-methyluridine-3'-phosphate
  modified_base 12: mod_base = OTHER; note = 2'-O-methylcytidine-3'-phosphate
  modified_base 13: mod_base = OTHER; note = 2'-O-methylcytidine-3'-phosphate
  modified_base 14: mod_base = OTHER; note = 2'-fluoroadenosine-3'-phosphate
  modified_base 15: mod_base = OTHER; note = 2'-O-methyluridine-3'-phosphate
  modified_base 16: mod_base = OTHER; note = 2'-fluorocytidine-3'-phosphate
  modified_base 17: mod_base = OTHER; note = 2'-O-methyladenosine-3'-phosphate
  modified_base 18: mod_base = OTHER; note = 2'-O-methylguanosine-3'-phosphate
  modified_base 19: mod_base = OTHER; note = 2'-O-methylcytidine-3'-phosphate
  modified_base 20: mod_base = OTHER; note = 2'-O-methylguanosine-3'-phosphate
  modified_base 21: mod_base = OTHER; note = 2'-O-methylcytidine-3'- phosphorothioate
  modified_base 22: mod_base = OTHER; note = 2'-O-methylcytidine-3'- phosphorothioate
  modified_base 23: mod_base = OTHER; note = 2'-O-methylcytidine-3'-phosphate
aatggtctcgtccatcagcgccc

SEQ ID NO: 452 - RNA, 23 nt, synthetic construct
  source 1..23: mol_type = other RNA; note = Description of Artificial Sequence: Synthetic oligonucleotide
  modified_base 1: mod_base = OTHER; note = 2'-O-methyladenosine-3'- phosphorothioate
  modified_base 2: mod_base = OTHER; note = 2'-fluoroadenosine-3'-phosphorothioate
  modified_base 3: mod_base = OTHER; note = 2'-O-methyladenosine-3'-phosphate
  modified_base 4: mod_base = OTHER; note = 2'-O-methylcytidine-3'-phosphate
  modified_base 5: mod_base = OTHER; note = 2'-O-methyluridine-3'-phosphate
  modified_base 6: mod_base = OTHER; note = 2'-fluorocytidine-3'-phosphate
  modified_base 7: mod_base = OTHER; note = 2'-O-methylcytidine-3'-phosphate
  modified_base 8: mod_base = OTHER; note = 2'-fluorouridine-3'-phosphate
  modified_base 9: mod_base = OTHER; note = 2'-fluorouridine-3'-phosphate
  modified_base 10: mod_base = OTHER; note = 2'-O-methylcytidine-3'-phosphate
  modified_base 11: mod_base = OTHER; note = 2'-O-methyladenosine-3'-phosphate
  modified_base 12: mod_base = OTHER; note = 2'-O-methyluridine-3'-phosphate
  modified_base 13: mod_base = OTHER; note = 2'-O-methylguanosine-3'-phosphate
  modified_base 14: mod_base = OTHER; note = 2'-fluoroguanosine-3'-phosphate
  modified_base 15: mod_base = OTHER; note = 2'-O-methyluridine-3'-phosphate
  modified_base 16: mod_base = OTHER; note = 2'-fluorocytidine-3'-phosphate
  modified_base 17: mod_base = OTHER; note = 2'-O-methyluridine-3'-phosphate
  modified_base 18: mod_base = OTHER; note = 2'-O-methylcytidine-3'-phosphate
  modified_base 19: mod_base = OTHER; note = 2'-O-methylguanosine-3'-phosphate
  modified_base 20: mod_base = OTHER; note = 2'-O-methyluridine-3'-phosphate
  modified_base 21: mod_base = OTHER; note = 2'-O-methylcytidine-3'- phosphorothioate
  modified_base 22: mod_base = OTHER; note = 2'-O-methylcytidine-3'- phosphorothioate
  modified_base 23: mod_base = OTHER; note = 2'-O-methyladenosine-3'-phosphate
aaactccttcatggtctcgtcca

SEQ ID NO: 453 - RNA, 23 nt, synthetic construct
  source 1..23: mol_type = other RNA; note = Description of Artificial Sequence: Synthetic oligonucleotide
  modified_base 1: mod_base = OTHER; note = 2'-O-methyladenosine-3'- phosphorothioate
  modified_base 2: mod_base = OTHER; note = 2'-fluoroguanosine-3'-phosphorothioate
  modified_base 3: mod_base = OTHER; note = 2'-O-methylcytidine-3'-phosphate
  modified_base 4: mod_base = OTHER; note = 2'-O-methylcytidine-3'-phosphate
  modified_base 5: mod_base = OTHER; note = 2'-O-methyluridine-3'-phosphate
  modified_base 6: mod_base = OTHER; note = 2'-fluorouridine-3'-phosphate
  modified_base 7: mod_base = OTHER; note = 2'-O-methylcytidine-3'-phosphate
  modified_base 8: mod_base = OTHER; note = 2'-fluoroadenosine-3'-phosphate
  modified_base 9: mod_base = OTHER; note = 2'-fluoroadenosine-3'-phosphate
  modified_base 10: mod_base = OTHER; note = 2'-O-methylcytidine-3'-phosphate
  modified_base 11: mod_base = OTHER; note = 2'-O-methyluridine-3'-phosphate
  modified_base 12: mod_base = OTHER; note = 2'-O-methylcytidine-3'-phosphate
  modified_base 13: mod_base = OTHER; note = 2'-O-methylcytidine-3'-phosphate
  modified_base 14: mod_base = OTHER; note = 2'-fluorouridine-3'-phosphate
  modified_base 15: mod_base = OTHER; note = 2'-O-methyluridine-3'-phosphate
  modified_base 16: mod_base = OTHER; note = 2'-fluorocytidine-3'-phosphate
  modified_base 17: mod_base = OTHER; note = 2'-O-methyladenosine-3'-phosphate
  modified_base 18: mod_base = OTHER; note = 2'-O-methyluridine-3'-phosphate
  modified_base 19: mod_base = OTHER; note = 2'-O-methylguanosine-3'-phosphate
  modified_base 20: mod_base = OTHER; note = 2'-O-methylguanosine-3'-phosphate
  modified_base 21: mod_base = OTHER; note = 2'-O-methyluridine-3'-phosphorothioate
  modified_base 22: mod_base = OTHER; note = 2'-O-methylcytidine-3'- phosphorothioate
  modified_base 23: mod_base = OTHER; note = 2'-O-methyluridine-3'-phosphate
agccttcaactccttcatggtct

SEQ ID NO: 454 - RNA, 23 nt, synthetic construct
  source 1..23: mol_type = other RNA; note = Description of Artificial Sequence: Synthetic oligonucleotide
  modified_base 1: mod_base = OTHER; note = 2'-O-methyladenosine-3'- phosphorothioate
  modified_base 2: mod_base = OTHER; note = 2'-fluoroadenosine-3'-phosphorothioate
  modified_base 3: mod_base = OTHER; note = 2'-O-methyluridine-3'-phosphate
  modified_base 4: mod_base = OTHER; note = 2'-O-methyluridine-3'-phosphate
  modified_base 5: mod_base = OTHER; note = 2'-O-methyluridine-3'-phosphate
  modified_base 6: mod_base = OTHER; note = 2'-fluoroguanosine-3'-phosphate
  modified_base 7: mod_base = OTHER; note = 2'-O-methyluridine-3'-phosphate
  modified_base 8: mod_base = OTHER; note = 2'-fluoroadenosine-3'-phosphate
  modified_base 9: mod_base = OTHER; note = 2'-fluoroguanosine-3'-phosphate
  modified_base 10: mod_base = OTHER; note = 2'-O-methylguanosine-3'-phosphate
  modified_base 11: mod_base = OTHER; note = 2'-O-methylcytidine-3'-phosphate
  modified_base 12: mod_base = OTHER; note = 2'-O-methylcytidine-3'-phosphate
  modified_base 13: mod_base = OTHER; note = 2'-O-methyluridine-3'-phosphate
  modified_base 14: mod_base = OTHER; note = 2'-fluorouridine-3'-phosphate
  modified_base 15: mod_base = OTHER; note = 2'-O-methylcytidine-3'-phosphate
  modified_base 16: mod_base = OTHER; note = 2'-fluoroadenosine-3'-phosphate
  modified_base 17: mod_base = OTHER; note = 2'-O-methyladenosine-3'-phosphate
  modified_base 18: mod_base = OTHER; note = 2'-O-methylcytidine-3'-phosphate
  modified_base 19: mod_base = OTHER; note = 2'-O-methyluridine-3'-phosphate
  modified_base 20: mod_base = OTHER; note = 2'-O-methylcytidine-3'-phosphate
  modified_base 21: mod_base = OTHER; note = 2'-O-methylcytidine-3'- phosphorothioate
  modified_base 22: mod_base = OTHER; note = 2'-O-methyluridine-3'-phosphorothioate
  modified_base 23: mod_base = OTHER; note = 2'-O-methyluridine-3'-phosphate
aatttgtaggccttcaactcctt

SEQ ID NO: 455 - RNA, 23 nt, synthetic construct
  source 1..23: mol_type = other RNA; note = Description of Artificial Sequence: Synthetic oligonucleotide
  modified_base 1: mod_base = OTHER; note = 2'-O-methyladenosine-3'- phosphorothioate
  modified_base 2: mod_base = OTHER; note = 2'-fluoroadenosine-3'-phosphorothioate
  modified_base 3: mod_base = OTHER; note = 2'-O-methylguanosine-3'-phosphate
  modified_base 4: mod_base = OTHER; note = 2'-O-methyluridine-3'-phosphate
  modified_base 5: mod_base = OTHER; note = 2'-O-methyluridine-3'-phosphate
  modified_base 6: mod_base = OTHER; note = 2'-fluorocytidine-3'-phosphate
  modified_base 7: mod_base = OTHER; note = 2'-O-methylcytidine-3'-phosphate
  modified_base 8: mod_base = OTHER; note = 2'-fluoroguanosine-3'-phosphate
  modified_base 9: mod_base = OTHER; note = 2'-fluoroadenosine-3'-phosphate
  modified_base 10: mod_base = OTHER; note = 2'-O-methyluridine-3'-phosphate
  modified_base 11: mod_base = OTHER; note = 2'-O-methyluridine-3'-phosphate
  modified_base 12: mod_base = OTHER; note = 2'-O-methyluridine-3'-phosphate
  modified_base 13: mod_base = OTHER; note = 2'-O-methylguanosine-3'-phosphate
  modified_base 14: mod_base = OTHER; note = 2'-fluorouridine-3'-phosphate
  modified_base 15: mod_base = OTHER; note = 2'-O-methyladenosine-3'-phosphate
  modified_base 16: mod_base = OTHER; note = 2'-fluoroguanosine-3'-phosphate
  modified_base 17: mod_base = OTHER; note = 2'-O-methylguanosine-3'-phosphate
  modified_base 18: mod_base = OTHER; note = 2'-O-methylcytidine-3'-phosphate
  modified_base 19: mod_base = OTHER; note = 2'-O-methylcytidine-3'-phosphate
  modified_base 20: mod_base = OTHER; note = 2'-O-methyluridine-3'-phosphate
  modified_base 21: mod_base = OTHER; note = 2'-O-methyluridine-3'-phosphorothioate
  modified_base 22: mod_base = OTHER; note = 2'-O-methylcytidine-3'- phosphorothioate
  modified_base 23: mod_base = OTHER; note = 2'-O-methyladenosine-3'-phosphate
aagttccgatttgtaggccttca

SEQ ID NO: 456 - RNA, 23 nt, synthetic construct
  source 1..23: mol_type = other RNA; note = Description of Artificial Sequence: Synthetic oligonucleotide
  modified_base 1: mod_base = OTHER; note = 2'-O-methyladenosine-3'- phosphorothioate
  modified_base 2: mod_base = OTHER; note = 2'-fluorouridine -3'-phosphorothioate
  modified_base 3: mod_base = OTHER; note = 2'-O-methyluridine-3'-phosphate
  modified_base 4: mod_base = OTHER; note = 2'-O-methylcytidine-3'-phosphate
  modified_base 5: mod_base = OTHER; note = 2'-O-methylcytidine-3'-phosphate
  modified_base 6: mod_base = OTHER; note = 2'-fluorouridine-3'-phosphate
  modified_base 7: mod_base = OTHER; note = 2'-O-methylcytidine-3'-phosphate
  modified_base 8: mod_base = OTHER; note = 2'-fluorocytidine-3'-phosphate
  modified_base 9: mod_base = OTHER; note = 2'-fluoroadenosine-3'-phosphate
  modified_base 10: mod_base = OTHER; note = 2'-O-methylguanosine-3'-phosphate
  modified_base 11: mod_base = OTHER; note = 2'-O-methyluridine-3'-phosphate
  modified_base 12: mod_base = OTHER; note = 2'-O-methyluridine-3'-phosphate
  modified_base 13: mod_base = OTHER; note = 2'-O-methylcytidine-3'-phosphate
  modified_base 14: mod_base = OTHER; note = 2'-fluorocytidine-3'-phosphate
  modified_base 15: mod_base = OTHER; note = 2'-O-methylguanosine-3'-phosphate
  modified_base 16: mod_base = OTHER; note = 2'-fluoroadenosine-3'-phosphate
  modified_base 17: mod_base = OTHER; note = 2'-O-methyluridine-3'-phosphate
  modified_base 18: mod_base = OTHER; note = 2'-O-methyluridine-3'-phosphate
  modified_base 19: mod_base = OTHER; note = 2'-O-methyluridine-3'-phosphate
  modified_base 20: mod_base = OTHER; note = 2'-O-methylguanosine-3'-phosphate
  modified_base 21: mod_base = OTHER; note = 2'-O-methyluridine-3'-phosphorothioate
  modified_base 22: mod_base = OTHER; note = 2'-O-methyladenosine-3'- phosphorothioate
  modified_base 23: mod_base = OTHER; note = 2'-O-methylguanosine-3'-phosphate
attcctccagttccgatttgtag

SEQ ID NO: 457 - RNA, 23 nt, synthetic construct
  source 1..23: mol_type = other RNA; note = Description of Artificial Sequence: Synthetic oligonucleotide
  modified_base 1: mod_base = OTHER; note = 2'-O-methyladenosine-3'- phosphorothioate
  modified_base 2: mod_base = OTHER; note = 2'-fluoroadenosine-3'-phosphorothioate
  modified_base 3: mod_base = OTHER; note = 2'-O-methylguanosine-3'-phosphate
  modified_base 4: mod_base = OTHER; note = 2'-O-methyluridine-3'-phosphate
  modified_base 5: mod_base = OTHER; note = 2'-O-methyluridine-3'-phosphate
  modified_base 6: mod_base = OTHER; note = 2'-fluoroguanosine-3'-phosphate
  modified_base 7: mod_base = OTHER; note = 2'-O-methyluridine-3'-phosphate
  modified_base 8: mod_base = OTHER; note = 2'-fluorouridine-3'-phosphate
  modified_base 9: mod_base = OTHER; note = 2'-fluorocytidine-3'-phosphate
  modified_base 10: mod_base = OTHER; note = 2'-O-methylcytidine-3'-phosphate
  modified_base 11: mod_base = OTHER; note = 2'-O-methyluridine-3'-phosphate
  modified_base 12: mod_base = OTHER; note = 2'-O-methylcytidine-3'-phosphate
  modified_base 13: mod_base = OTHER; note = 2'-O-methylcytidine-3'-phosphate
  modified_base 14: mod_base = OTHER; note = 2'-fluoroadenosine-3'-phosphate
  modified_base 15: mod_base = OTHER; note = 2'-O-methylguanosine-3'-phosphate
  modified_base 16: mod_base = OTHER; note = 2'-fluorouridine-3'-phosphate
  modified_base 17: mod_base = OTHER; note = 2'-O-methyluridine-3'-phosphate
  modified_base 18: mod_base = OTHER; note = 2'-O-methylcytidine-3'-phosphate
  modified_base 19: mod_base = OTHER; note = 2'-O-methylcytidine-3'-phosphate
  modified_base 20: mod_base = OTHER; note = 2'-O-methylguanosine-3'-phosphate
  modified_base 21: mod_base = OTHER; note = 2'-O-methyladenosine-3'- phosphorothioate
  modified_base 22: mod_base = OTHER; note = 2'-O-methyluridine-3'-phosphorothioate
  modified_base 23: mod_base = OTHER; note = 2'-O-methyluridine-3'-phosphate
aagttgttcctccagttccgatt

SEQ ID NO: 458 - RNA, 23 nt, synthetic construct
  source 1..23: mol_type = other RNA; note = Description of Artificial Sequence: Synthetic oligonucleotide
  modified_base 1: mod_base = OTHER; note = 2'-O-methyladenosine-3'- phosphorothioate
  modified_base 2: mod_base = OTHER; note = 2'-fluoroadenosine-3'-phosphorothioate
  modified_base 3: mod_base = OTHER; note = 2'-O-methylcytidine-3'-phosphate
  modified_base 4: mod_base = OTHER; note = 2'-O-methylcytidine-3'-phosphate
  modified_base 5: mod_base = OTHER; note = 2'-O-methylguanosine-3'-phosphate
  modified_base 6: mod_base = OTHER; note = 2'-fluoroguanosine-3'-phosphate
  modified_base 7: mod_base = OTHER; note = 2'-O-methylguanosine-3'-phosphate
  modified_base 8: mod_base = OTHER; note = 2'-fluoroguanosine-3'-phosphate
  modified_base 9: mod_base = OTHER; note = 2'-fluorouridine-3'-phosphate
  modified_base 10: mod_base = OTHER; note = 2'-O-methylcytidine-3'-phosphate
  modified_base 11: mod_base = OTHER; note = 2'-O-methyladenosine-3'-phosphate
  modified_base 12: mod_base = OTHER; note = 2'-O-methylguanosine-3'-phosphate
  modified_base 13: mod_base = OTHER; note = 2'-O-methyluridine-3'-phosphate
  modified_base 14: mod_base = OTHER; note = 2'-fluorouridine-3'-phosphate
  modified_base 15: mod_base = OTHER; note = 2'-O-methylguanosine-3'-phosphate
  modified_base 16: mod_base = OTHER; note = 2'-fluorouridine-3'-phosphate
  modified_base 17: mod_base = OTHER; note = 2'-O-methyluridine-3'-phosphate
  modified_base 18: mod_base = OTHER; note = 2'-O-methylcytidine-3'-phosphate
  modified_base 19: mod_base = OTHER; note = 2'-O-methylcytidine-3'-phosphate
  modified_base 20: mod_base = OTHER; note = 2'-O-methyluridine-3'-phosphate
  modified_base 21: mod_base = OTHER; note = 2'-O-methylcytidine-3'- phosphorothioate
  modified_base 22: mod_base = OTHER; note = 2'-O-methylcytidine-3'- phosphorothioate
  modified_base 23: mod_base = OTHER; note = 2'-O-methyladenosine-3'-phosphate
aaccggggtcagttgttcctcca

SEQ ID NO: 459 - RNA, 23 nt, synthetic construct
  source 1..23: mol_type = other RNA; note = Description of Artificial Sequence: Synthetic oligonucleotide
  modified_base 1: mod_base = OTHER; note = 2'-O-methyladenosine-3'- phosphorothioate
  modified_base 2: mod_base = OTHER; note = 2'-fluorocytidine-3'-phosphorothioate
  modified_base 3: mod_base = OTHER; note = 2'-O-methyluridine-3'-phosphate
  modified_base 4: mod_base = OTHER; note = 2'-O-methyluridine-3'-phosphate
  modified_base 5: mod_base = OTHER; note = 2'-O-methylguanosine-3'-phosphate
  modified_base 6: mod_base = OTHER; note = 2'-fluoroguanosine-3'-phosphate
  modified_base 7: mod_base = OTHER; note = 2'-O-methyladenosine-3'-phosphate
  modified_base 8: mod_base = OTHER; note = 2'-fluorocytidine-3'-phosphate
  modified_base 9: mod_base = OTHER; note = 2'-fluoroadenosine-3'-phosphate
  modified_base 10: mod_base = OTHER; note = 2'-O-methylguanosine-3'-phosphate
  modified_base 11: mod_base = OTHER; note = 2'-O-methylcytidine-3'-phosphate
  modified_base 12: mod_base = OTHER; note = 2'-O-methylcytidine-3'-phosphate
  modified_base 13: mod_base = OTHER; note = 2'-O-methylguanosine-3'-phosphate
  modified_base 14: mod_base = OTHER; note = 2'-fluorouridine-3'-phosphate
  modified_base 15: mod_base = OTHER; note = 2'-O-methylguanosine-3'-phosphate
  modified_base 16: mod_base = OTHER; note = 2'-fluorocytidine-3'-phosphate
  modified_base 17: mod_base = OTHER; note = 2'-O-methylcytidine-3'-phosphate
  modified_base 18: mod_base = OTHER; note = 2'-O-methylcytidine-3'-phosphate
  modified_base 19: mod_base = OTHER; note = 2'-O-methylguanosine-3'-phosphate
  modified_base 20: mod_base = OTHER; note = 2'-O-methylcytidine-3'-phosphate
  modified_base 21: mod_base = OTHER; note = 2'-O-methylguanosine-3'- phosphorothioate
  modified_base 22: mod_base = OTHER; note = 2'-O-methyluridine-3'-phosphorothioate
  modified_base 23: mod_base = OTHER; note = 2'-O-methylcytidine-3'-phosphate
acttggacagccgtgcccgcgtc

SEQ ID NO: 460 - RNA, 23 nt, synthetic construct
  source 1..23: mol_type = other RNA; note = Description of Artificial Sequence: Synthetic oligonucleotide
  modified_base 1: mod_base = OTHER; note = 2'-O-methyladenosine-3'- phosphorothioate
  modified_base 2: mod_base = OTHER; note = 2'-fluoroadenosine-3'-phosphorothioate
  modified_base 3: mod_base = OTHER; note = 2'-O-methylguanosine-3'-phosphate
  modified_base 4: mod_base = OTHER; note = 2'-O-methylcytidine-3'-phosphate
  modified_base 5: mod_base = OTHER; note = 2'-O-methyluridine-3'-phosphate
  modified_base 6: mod_base = OTHER; note = 2'-fluorocytidine-3'-phosphate
  modified_base 7: mod_base = OTHER; note = 2'-O-methylcytidine-3'-phosphate
  modified_base 8: mod_base = OTHER; note = 2'-fluorouridine-3'-phosphate
  modified_base 9: mod_base = OTHER; note = 2'-fluorouridine-3'-phosphate
  modified_base 10: mod_base = OTHER; note = 2'-O-methylguanosine-3'-phosphate
  modified_base 11: mod_base = OTHER; note = 2'-O-methylguanosine-3'-phosphate
  modified_base 12: mod_base = OTHER; note = 2'-O-methyladenosine-3'-phosphate
  modified_base 13: mod_base = OTHER; note = 2'-O-methylcytidine-3'-phosphate
  modified_base 14: mod_base = OTHER; note = 2'-fluoroadenosine-3'-phosphate
  modified_base 15: mod_base = OTHER; note = 2'-O-methylguanosine-3'-phosphate
  modified_base 16: mod_base = OTHER; note = 2'-fluorocytidine-3'-phosphate
  modified_base 17: mod_base = OTHER; note = 2'-O-methylcytidine-3'-phosphate
  modified_base 18: mod_base = OTHER; note = 2'-O-methylguanosine-3'-phosphate
  modified_base 19: mod_base = OTHER; note = 2'-O-methyluridine-3'-phosphate
  modified_base 20: mod_base = OTHER; note = 2'-O-methylguanosine-3'-phosphate
  modified_base 21: mod_base = OTHER; note = 2'-O-methylcytidine-3'- phosphorothioate
  modified_base 22: mod_base = OTHER; note = 2'-O-methylcytidine-3'- phosphorothioate
  modified_base 23: mod_base = OTHER; note = 2'-O-methylcytidine-3'-phosphate
aagctccttggacagccgtgccc

SEQ ID NO: 461 - RNA, 23 nt, synthetic construct
  source 1..23: mol_type = other RNA; note = Description of Artificial Sequence: Synthetic oligonucleotide
  modified_base 1: mod_base = OTHER; note = 2'-O-methyladenosine-3'- phosphorothioate
  modified_base 2: mod_base = OTHER; note = 2'-fluorocytidine-3'-phosphorothioate
  modified_base 3: mod_base = OTHER; note = 2'-O-methylcytidine-3'-phosphate
  modified_base 4: mod_base = OTHER; note = 2'-O-methyluridine-3'-phosphate
  modified_base 5: mod_base = OTHER; note = 2'-O-methylguanosine-3'-phosphate
  modified_base 6: mod_base = OTHER; note = 2'-fluorocytidine-3'-phosphate
  modified_base 7: mod_base = OTHER; note = 2'-O-methyladenosine-3'-phosphate
  modified_base 8: mod_base = OTHER; note = 2'-fluoroguanosine-3'-phosphate
  modified_base 9: mod_base = OTHER; note = 2'-fluorocytidine-3'-phosphate
  modified_base 10: mod_base = OTHER; note = 2'-O-methyluridine-3'-phosphate
  modified_base 11: mod_base = OTHER; note = 2'-O-methylcytidine-3'-phosphate
  modified_base 12: mod_base = OTHER; note = 2'-O-methylcytidine-3'-phosphate
  modified_base 13: mod_base = OTHER; note = 2'-O-methyluridine-3'-phosphate
  modified_base 14: mod_base = OTHER; note = 2'-fluorouridine-3'-phosphate
  modified_base 15: mod_base = OTHER; note = 2'-O-methylguanosine-3'-phosphate
  modified_base 16: mod_base = OTHER; note = 2'-fluoroguanosine-3'-phosphate
  modified_base 17: mod_base = OTHER; note = 2'-O-methyladenosine-3'-phosphate
  modified_base 18: mod_base = OTHER; note = 2'-O-methylcytidine-3'-phosphate
  modified_base 19: mod_base = OTHER; note = 2'-O-methyladenosine-3'-phosphate
  modified_base 20: mod_base = OTHER; note = 2'-O-methylguanosine-3'-phosphate
  modified_base 21: mod_base = OTHER; note = 2'-O-methylcytidine-3'- phosphorothioate
  modified_base 22: mod_base = OTHER; note = 2'-O-methylcytidine-3'- phosphorothioate
  modified_base 23: mod_base = OTHER; note = 2'-O-methylguanosine-3'-phosphate
acctgcagctccttggacagccg

SEQ ID NO: 462 - RNA, 23 nt, synthetic construct
  source 1..23: mol_type = other RNA; note = Description of Artificial Sequence: Synthetic oligonucleotide
  modified_base 1: mod_base = OTHER; note = 2'-O-methyladenosine-3'- phosphorothioate
  modified_base 2: mod_base = OTHER; note = 2'-fluoroadenosine-3'-phosphorothioate
  modified_base 3: mod_base = OTHER; note = 2'-O-methyluridine-3'-phosphate
  modified_base 4: mod_base = OTHER; note = 2'-O-methylguanosine-3'-phosphate
  modified_base 5: mod_base = OTHER; note = 2'-O-methyluridine-3'-phosphate
  modified_base 6: mod_base = OTHER; note = 2'-fluorocytidine-3'-phosphate
  modified_base 7: mod_base = OTHER; note = 2'-O-methylcytidine-3'-phosphate
  modified_base 8: mod_base = OTHER; note = 2'-fluoroguanosine-3'-phosphate
  modified_base 9: mod_base = OTHER; note = 2'-fluorocytidine-3'-phosphate
  modified_base 10: mod_base = OTHER; note = 2'-O-methylguanosine-3'-phosphate
  modified_base 11: mod_base = OTHER; note = 2'-O-methylcytidine-3'-phosphate
  modified_base 12: mod_base = OTHER; note = 2'-O-methylcytidine-3'-phosphate
  modified_base 13: mod_base = OTHER; note = 2'-O-methylcytidine-3'-phosphate
  modified_base 14: mod_base = OTHER; note = 2'-fluoroadenosine-3'-phosphate
  modified_base 15: mod_base = OTHER; note = 2'-O-methylguanosine-3'-phosphate
  modified_base 16: mod_base = OTHER; note = 2'-fluorocytidine-3'-phosphate
  modified_base 17: mod_base = OTHER; note = 2'-O-methylcytidine-3'-phosphate
  modified_base 18: mod_base = OTHER; note = 2'-O-methylguanosine-3'-phosphate
  modified_base 19: mod_base = OTHER; note = 2'-O-methylguanosine-3'-phosphate
  modified_base 20: mod_base = OTHER; note = 2'-O-methylguanosine-3'-phosphate
  modified_base 21: mod_base = OTHER; note = 2'-O-methylcytidine-3'- phosphorothioate
  modified_base 22: mod_base = OTHER; note = 2'-O-methylcytidine-3'- phosphorothioate
  modified_base 23: mod_base = OTHER; note = 2'-O-methyluridine-3'-phosphate
aatgtccgcgcccagccgggcct

SEQ ID NO: 463 - RNA, 23 nt, synthetic construct
  source 1..23: mol_type = other RNA; note = Description of Artificial Sequence: Synthetic oligonucleotide
  modified_base 1: mod_base = OTHER; note = 2'-O-methyladenosine-3'- phosphorothioate
  modified_base 2: mod_base = OTHER; note = 2'-fluorouridine -3'-phosphorothioate
  modified_base 3: mod_base = OTHER; note = 2'-O-methylcytidine-3'-phosphate
  modified_base 4: mod_base = OTHER; note = 2'-O-methylcytidine-3'-phosphate
  modified_base 5: mod_base = OTHER; note = 2'-O-methyluridine-3'-phosphate
  modified_base 6: mod_base = OTHER; note = 2'-fluorocytidine-3'-phosphate
  modified_base 7: mod_base = OTHER; note = 2'-O-methylcytidine-3'-phosphate
  modified_base 8: mod_base = OTHER; note = 2'-fluoroadenosine-3'-phosphate
  modified_base 9: mod_base = OTHER; note = 2'-fluorouridine-3'-phosphate
  modified_base 10: mod_base = OTHER; note = 2'-O-methylguanosine-3'-phosphate
  modified_base 11: mod_base = OTHER; note = 2'-O-methyluridine-3'-phosphate
  modified_base 12: mod_base = OTHER; note = 2'-O-methylcytidine-3'-phosphate
  modified_base 13: mod_base = OTHER; note = 2'-O-methylcytidine-3'-phosphate
  modified_base 14: mod_base = OTHER; note = 2'-fluoroguanosine-3'-phosphate
  modified_base 15: mod_base = OTHER; note = 2'-O-methylcytidine-3'-phosphate
  modified_base 16: mod_base = OTHER; note = 2'-fluoroguanosine-3'-phosphate
  modified_base 17: mod_base = OTHER; note = 2'-O-methylcytidine-3'-phosphate
  modified_base 18: mod_base = OTHER; note = 2'-O-methylcytidine-3'-phosphate
  modified_base 19: mod_base = OTHER; note = 2'-O-methylcytidine-3'-phosphate
  modified_base 20: mod_base = OTHER; note = 2'-O-methyladenosine-3'-phosphate
  modified_base 21: mod_base = OTHER; note = 2'-O-methylguanosine-3'- phosphorothioate
  modified_base 22: mod_base = OTHER; note = 2'-O-methylcytidine-3'- phosphorothioate
  modified_base 23: mod_base = OTHER; note = 2'-O-methylcytidine-3'-phosphate
atcctccatgtccgcgcccagcc

SEQ ID NO: 464 - RNA, 23 nt, synthetic construct
  source 1..23: mol_type = other RNA; note = Description of Artificial Sequence: Synthetic oligonucleotide
  modified_base 1: mod_base = OTHER; note = 2'-O-methyladenosine-3'- phosphorothioate
  modified_base 2: mod_base = OTHER; note = 2'-fluoroguanosine-3'-phosphorothioate
  modified_base 3: mod_base = OTHER; note = 2'-O-methylcytidine-3'-phosphate
  modified_base 4: mod_base = OTHER; note = 2'-O-methyladenosine-3'-phosphate
  modified_base 5: mod_base = OTHER; note = 2'-O-methylcytidine-3'-phosphate
  modified_base 6: mod_base = OTHER; note = 2'-fluoroguanosine-3'-phosphate
  modified_base 7: mod_base = OTHER; note = 2'-O-methyluridine-3'-phosphate
  modified_base 8: mod_base = OTHER; note = 2'-fluorocytidine-3'-phosphate
  modified_base 9: mod_base = OTHER; note = 2'-fluorocytidine-3'-phosphate
  modified_base 10: mod_base = OTHER; note = 2'-O-methyluridine-3'-phosphate
  modified_base 11: mod_base = OTHER; note = 2'-O-methylcytidine-3'-phosphate
  modified_base 12: mod_base = OTHER; note = 2'-O-methylcytidine-3'-phosphate
  modified_base 13: mod_base = OTHER; note = 2'-O-methyladenosine-3'-phosphate
  modified_base 14: mod_base = OTHER; note = 2'-fluorouridine-3'-phosphate
  modified_base 15: mod_base = OTHER; note = 2'-O-methylguanosine-3'-phosphate
  modified_base 16: mod_base = OTHER; note = 2'-fluorouridine-3'-phosphate
  modified_base 17: mod_base = OTHER; note = 2'-O-methylcytidine-3'-phosphate
  modified_base 18: mod_base = OTHER; note = 2'-O-methylcytidine-3'-phosphate
  modified_base 19: mod_base = OTHER; note = 2'-O-methylguanosine-3'-phosphate
  modified_base 20: mod_base = OTHER; note = 2'-O-methylcytidine-3'-phosphate
  modified_base 21: mod_base = OTHER; note = 2'-O-methylguanosine-3'- phosphorothioate
  modified_base 22: mod_base = OTHER; note = 2'-O-methylcytidine-3'- phosphorothioate
  modified_base 23: mod_base = OTHER; note = 2'-O-methylcytidine-3'-phosphate
agcacgtcctccatgtccgcgcc

SEQ ID NO: 465 - RNA, 23 nt, synthetic construct
  source 1..23: mol_type = other RNA; note = Description of Artificial Sequence: Synthetic oligonucleotide
  modified_base 1: mod_base = OTHER; note = 2'-O-methyladenosine-3'- phosphorothioate
  modified_base 2: mod_base = OTHER; note = 2'-fluorocytidine-3'-phosphorothioate
  modified_base 3: mod_base = OTHER; note = 2'-O-methyladenosine-3'-phosphate
  modified_base 4: mod_base = OTHER; note = 2'-O-methylcytidine-3'-phosphate
  modified_base 5: mod_base = OTHER; note = 2'-O-methyladenosine-3'-phosphate
  modified_base 6: mod_base = OTHER; note = 2'-fluorocytidine-3'-phosphate
  modified_base 7: mod_base = OTHER; note = 2'-O-methylguanosine-3'-phosphate
  modified_base 8: mod_base = OTHER; note = 2'-fluorouridine-3'-phosphate
  modified_base 9: mod_base = OTHER; note = 2'-fluorocytidine-3'-phosphate
  modified_base 10: mod_base = OTHER; note = 2'-O-methylcytidine-3'-phosphate
  modified_base 11: mod_base = OTHER; note = 2'-O-methyluridine-3'-phosphate
  modified_base 12: mod_base = OTHER; note = 2'-O-methylcytidine-3'-phosphate
  modified_base 13: mod_base = OTHER; note = 2'-O-methylcytidine-3'-phosphate
  modified_base 14: mod_base = OTHER; note = 2'-fluoroadenosine-3'-phosphate
  modified_base 15: mod_base = OTHER; note = 2'-O-methyluridine-3'-phosphate
  modified_base 16: mod_base = OTHER; note = 2'-fluoroguanosine-3'-phosphate
  modified_base 17: mod_base = OTHER; note = 2'-O-methyluridine-3'-phosphate
  modified_base 18: mod_base = OTHER; note = 2'-O-methylcytidine-3'-phosphate
  modified_base 19: mod_base = OTHER; note = 2'-O-methylcytidine-3'-phosphate
  modified_base 20: mod_base = OTHER; note = 2'-O-methylguanosine-3'-phosphate
  modified_base 21: mod_base = OTHER; note = 2'-O-methylcytidine-3'- phosphorothioate
  modified_base 22: mod_base = OTHER; note = 2'-O-methylguanosine-3'- phosphorothioate
  modified_base 23: mod_base = OTHER; note = 2'-O-methylcytidine-3'-phosphate
acacacgtcctccatgtccgcgc

SEQ ID NO: 466 - RNA, 23 nt, synthetic construct
  source 1..23: mol_type = other RNA; note = Description of Artificial Sequence: Synthetic oligonucleotide
  modified_base 1: mod_base = OTHER; note = 2'-O-methyladenosine-3'- phosphorothioate
  modified_base 2: mod_base = OTHER; note = 2'-fluorocytidine-3'-phosphorothioate
  modified_base 3: mod_base = OTHER; note = 2'-O-methylguanosine-3'-phosphate
  modified_base 4: mod_base = OTHER; note = 2'-O-methylcytidine-3'-phosphate
  modified_base 5: mod_base = OTHER; note = 2'-O-methyladenosine-3'-phosphate
  modified_base 6: mod_base = OTHER; note = 2'-fluorocytidine-3'-phosphate
  modified_base 7: mod_base = OTHER; note = 2'-O-methylguanosine-3'-phosphate
  modified_base 8: mod_base = OTHER; note = 2'-fluorouridine-3'-phosphate
  modified_base 9: mod_base = OTHER; note = 2'-fluorocytidine-3'-phosphate
  modified_base 10: mod_base = OTHER; note = 2'-O-methylcytidine-3'-phosphate
  modified_base 11: mod_base = OTHER; note = 2'-O-methyluridine-3'-phosphate
  modified_base 12: mod_base = OTHER; note = 2'-O-methylcytidine-3'-phosphate
  modified_base 13: mod_base = OTHER; note = 2'-O-methylcytidine-3'-phosphate
  modified_base 14: mod_base = OTHER; note = 2'-fluoroadenosine-3'-phosphate
  modified_base 15: mod_base = OTHER; note = 2'-O-methyluridine-3'-phosphate
  modified_base 16: mod_base = OTHER; note = 2'-fluoroguanosine-3'-phosphate
  modified_base 17: mod_base = OTHER; note = 2'-O-methyluridine-3'-phosphate
  modified_base 18: mod_base = OTHER; note = 2'-O-methylcytidine-3'-phosphate
  modified_base 19: mod_base = OTHER; note = 2'-O-methylcytidine-3'-phosphate
  modified_base 20: mod_base = OTHER; note = 2'-O-methylguanosine-3'-phosphate
  modified_base 21: mod_base = OTHER; note = 2'-O-methylcytidine-3'- phosphorothioate
  modified_base 22: mod_base = OTHER; note = 2'-O-methylguanosine-3'- phosphorothioate
  modified_base 23: mod_base = OTHER; note = 2'-O-methylcytidine-3'-phosphate
acgcacgtcctccatgtccgcgc

SEQ ID NO: 467 - RNA, 23 nt, synthetic construct
  source 1..23: mol_type = other RNA; note = Description of Artificial Sequence: Synthetic oligonucleotide
  modified_base 1: mod_base = OTHER; note = 2'-O-methyladenosine-3'- phosphorothioate
  modified_base 2: mod_base = OTHER; note = 2'-fluoroguanosine-3'-phosphorothioate
  modified_base 3: mod_base = OTHER; note = 2'-O-methylcytidine-3'-phosphate
  modified_base 4: mod_base = OTHER; note = 2'-O-methylguanosine-3'-phosphate
  modified_base 5: mod_base = OTHER; note = 2'-O-methylcytidine-3'-phosphate
  modified_base 6: mod_base = OTHER; note = 2'-fluoroadenosine-3'-phosphate
  modified_base 7: mod_base = OTHER; note = 2'-O-methylcytidine-3'-phosphate
  modified_base 8: mod_base = OTHER; note = 2'-fluoroguanosine-3'-phosphate
  modified_base 9: mod_base = OTHER; note = 2'-fluorouridine-3'-phosphate
  modified_base 10: mod_base = OTHER; note = 2'-O-methylcytidine-3'-phosphate
  modified_base 11: mod_base = OTHER; note = 2'-O-methylcytidine-3'-phosphate
  modified_base 12: mod_base = OTHER; note = 2'-O-methyluridine-3'-phosphate
  modified_base 13: mod_base = OTHER; note = 2'-O-methylcytidine-3'-phosphate
  modified_base 14: mod_base = OTHER; note = 2'-fluorocytidine-3'-phosphate
  modified_base 15: mod_base = OTHER; note = 2'-O-methyladenosine-3'-phosphate
  modified_base 16: mod_base = OTHER; note = 2'-fluorouridine-3'-phosphate
  modified_base 17: mod_base = OTHER; note = 2'-O-methylguanosine-3'-phosphate
  modified_base 18: mod_base = OTHER; note = 2'-O-methyluridine-3'-phosphate
  modified_base 19: mod_base = OTHER; note = 2'-O-methylcytidine-3'-phosphate
  modified_base 20: mod_base = OTHER; note = 2'-O-methylcytidine-3'-phosphate
  modified_base 21: mod_base = OTHER; note = 2'-O-methylguanosine-3'- phosphorothioate
  modified_base 22: mod_base = OTHER; note = 2'-O-methylcytidine-3'- phosphorothioate
  modified_base 23: mod_base = OTHER; note = 2'-O-methylguanosine-3'-phosphate
agcgcacgtcctccatgtccgcg

SEQ ID NO: 468 - RNA, 23 nt, synthetic construct
  source 1..23: mol_type = other RNA; note = Description of Artificial Sequence: Synthetic oligonucleotide
  modified_base 1: mod_base = OTHER; note = 2'-O-methyladenosine-3'- phosphorothioate
  modified_base 2: mod_base = OTHER; note = 2'-fluorocytidine-3'-phosphorothioate
  modified_base 3: mod_base = OTHER; note = 2'-O-methylguanosine-3'-phosphate
  modified_base 4: mod_base = OTHER; note = 2'-O-methylcytidine-3'-phosphate
  modified_base 5: mod_base = OTHER; note = 2'-O-methylguanosine-3'-phosphate
  modified_base 6: mod_base = OTHER; note = 2'-fluorocytidine-3'-phosphate
  modified_base 7: mod_base = OTHER; note = 2'-O-methyladenosine-3'-phosphate
  modified_base 8: mod_base = OTHER; note = 2'-fluorocytidine-3'-phosphate
  modified_base 9: mod_base = OTHER; note = 2'-fluoroguanosine-3'-phosphate
  modified_base 10: mod_base = OTHER; note = 2'-O-methyluridine-3'-phosphate
  modified_base 11: mod_base = OTHER; note = 2'-O-methylcytidine-3'-phosphate
  modified_base 12: mod_base = OTHER; note = 2'-O-methylcytidine-3'-phosphate
  modified_base 13: mod_base = OTHER; note = 2'-O-methyluridine-3'-phosphate
  modified_base 14: mod_base = OTHER; note = 2'-fluorocytidine-3'-phosphate
  modified_base 15: mod_base = OTHER; note = 2'-O-methylcytidine-3'-phosphate
  modified_base 16: mod_base = OTHER; note = 2'-fluoroadenosine-3'-phosphate
  modified_base 17: mod_base = OTHER; note = 2'-O-methyluridine-3'-phosphate
  modified_base 18: mod_base = OTHER; note = 2'-O-methylguanosine-3'-phosphate
  modified_base 19: mod_base = OTHER; note = 2'-O-methyluridine-3'-phosphate
  modified_base 20: mod_base = OTHER; note = 2'-O-methylcytidine-3'-phosphate
  modified_base 21: mod_base = OTHER; note = 2'-O-methylcytidine-3'- phosphorothioate
  modified_base 22: mod_base = OTHER; note = 2'-O-methylguanosine-3'- phosphorothioate
  modified_base 23: mod_base = OTHER; note = 2'-O-methylcytidine-3'-phosphate
acgcgcacgtcctccatgtccgc

SEQ ID NO: 469 - RNA, 23 nt, synthetic construct
  source 1..23: mol_type = other RNA; note = Description of Artificial Sequence: Synthetic oligonucleotide
  modified_base 1: mod_base = OTHER; note = 2'-O-methyladenosine-3'- phosphorothioate
  modified_base 2: mod_base = OTHER; note = 2'-fluorocytidine-3'-phosphorothioate
  modified_base 3: mod_base = OTHER; note = 2'-O-methylcytidine-3'-phosphate
  modified_base 4: mod_base = OTHER; note = 2'-O-methylguanosine-3'-phosphate
  modified_base 5: mod_base = OTHER; note = 2'-O-methylcytidine-3'-phosphate
  modified_base 6: mod_base = OTHER; note = 2'-fluoroguanosine-3'-phosphate
  modified_base 7: mod_base = OTHER; note = 2'-O-methylcytidine-3'-phosphate
  modified_base 8: mod_base = OTHER; note = 2'-fluoroadenosine-3'-phosphate
  modified_base 9: mod_base = OTHER; note = 2'-fluorocytidine-3'-phosphate
  modified_base 10: mod_base = OTHER; note = 2'-O-methylguanosine-3'-phosphate
  modified_base 11: mod_base = OTHER; note = 2'-O-methyluridine-3'-phosphate
  modified_base 12: mod_base = OTHER; note = 2'-O-methylcytidine-3'-phosphate
  modified_base 13: mod_base = OTHER; note = 2'-O-methylcytidine-3'-phosphate
  modified_base 14: mod_base = OTHER; note = 2'-fluorouridine-3'-phosphate
  modified_base 15: mod_base = OTHER; note = 2'-O-methylcytidine-3'-phosphate
  modified_base 16: mod_base = OTHER; note = 2'-fluorocytidine-3'-phosphate
  modified_base 17: mod_base = OTHER; note = 2'-O-methyladenosine-3'-phosphate
  modified_base 18: mod_base = OTHER; note = 2'-O-methyluridine-3'-phosphate
  modified_base 19: mod_base = OTHER; note = 2'-O-methylguanosine-3'-phosphate
  modified_base 20: mod_base = OTHER; note = 2'-O-methyluridine-3'-phosphate
  modified_base 21: mod_base = OTHER; note = 2'-O-methylcytidine-3'- phosphorothioate
  modified_base 22: mod_base = OTHER; note = 2'-O-methylcytidine-3'- phosphorothioate
  modified_base 23: mod_base = OTHER; note = 2'-O-methylguanosine-3'-phosphate
accgcgcacgtcctccatgtccg

SEQ ID NO: 470 - RNA, 23 nt, synthetic construct
  source 1..23: mol_type = other RNA; note = Description of Artificial Sequence: Synthetic oligonucleotide
  modified_base 1: mod_base = OTHER; note = 2'-O-methyladenosine-3'- phosphorothioate
  modified_base 2: mod_base = OTHER; note = 2'-fluoroguanosine-3'-phosphorothioate
  modified_base 3: mod_base = OTHER; note = 2'-O-methylcytidine-3'-phosphate
  modified_base 4: mod_base = OTHER; note = 2'-O-methylcytidine-3'-phosphate
  modified_base 5: mod_base = OTHER; note = 2'-O-methylguanosine-3'-phosphate
  modified_base 6: mod_base = OTHER; note = 2'-fluorocytidine-3'-phosphate
  modified_base 7: mod_base = OTHER; note = 2'-O-methylguanosine-3'-phosphate
  modified_base 8: mod_base = OTHER; note = 2'-fluorocytidine-3'-phosphate
  modified_base 9: mod_base = OTHER; note = 2'-fluoroadenosine-3'-phosphate
  modified_base 10: mod_base = OTHER; note = 2'-O-methylcytidine-3'-phosphate
  modified_base 11: mod_base = OTHER; note = 2'-O-methylguanosine-3'-phosphate
  modified_base 12: mod_base = OTHER; note = 2'-O-methyluridine-3'-phosphate
  modified_base 13: mod_base = OTHER; note = 2'-O-methylcytidine-3'-phosphate
  modified_base 14: mod_base = OTHER; note = 2'-fluorocytidine-3'-phosphate
  modified_base 15: mod_base = OTHER; note = 2'-O-methyluridine-3'-phosphate
  modified_base 16: mod_base = OTHER; note = 2'-fluorocytidine-3'-phosphate
  modified_base 17: mod_base = OTHER; note = 2'-O-methylcytidine-3'-phosphate
  modified_base 18: mod_base = OTHER; note = 2'-O-methyladenosine-3'-phosphate
  modified_base 19: mod_base = OTHER; note = 2'-O-methyluridine-3'-phosphate
  modified_base 20: mod_base = OTHER; note = 2'-O-methylguanosine-3'-phosphate
  modified_base 21: mod_base = OTHER; note = 2'-O-methyluridine-3'-phosphorothioate
  modified_base 22: mod_base = OTHER; note = 2'-O-methylcytidine-3'- phosphorothioate
  modified_base 23: mod_base = OTHER; note = 2'-O-methylcytidine-3'-phosphate
agccgcgcacgtcctccatgtcc

SEQ ID NO: 471 - RNA, 23 nt, synthetic construct
  source 1..23: mol_type = other RNA; note = Description of Artificial Sequence: Synthetic oligonucleotide
  modified_base 1: mod_base = OTHER; note = 2'-O-methyladenosine-3'- phosphorothioate
  modified_base 2: mod_base = OTHER; note = 2'-fluoroguanosine-3'-phosphorothioate
  modified_base 3: mod_base = OTHER; note = 2'-O-methylguanosine-3'-phosphate
  modified_base 4: mod_base = OTHER; note = 2'-O-methylcytidine-3'-phosphate
  modified_base 5: mod_base = OTHER; note = 2'-O-methylcytidine-3'-phosphate
  modified_base 6: mod_base = OTHER; note = 2'-fluoroguanosine-3'-phosphate
  modified_base 7: mod_base = OTHER; note = 2'-O-methylcytidine-3'-phosphate
  modified_base 8: mod_base = OTHER; note = 2'-fluoroguanosine-3'-phosphate
  modified_base 9: mod_base = OTHER; note = 2'-fluorocytidine-3'-phosphate
  modified_base 10: mod_base = OTHER; note = 2'-O-methyladenosine-3'-phosphate
  modified_base 11: mod_base = OTHER; note = 2'-O-methylcytidine-3'-phosphate
  modified_base 12: mod_base = OTHER; note = 2'-O-methylguanosine-3'-phosphate
  modified_base 13: mod_base = OTHER; note = 2'-O-methyluridine-3'-phosphate
  modified_base 14: mod_base = OTHER; note = 2'-fluorocytidine-3'-phosphate
  modified_base 15: mod_base = OTHER; note = 2'-O-methylcytidine-3'-phosphate
  modified_base 16: mod_base = OTHER; note = 2'-fluorouridine-3'-phosphate
  modified_base 17: mod_base = OTHER; note = 2'-O-methylcytidine-3'-phosphate
  modified_base 18: mod_base = OTHER; note = 2'-O-methylcytidine-3'-phosphate
  modified_base 19: mod_base = OTHER; note = 2'-O-methyladenosine-3'-phosphate
  modified_base 20: mod_base = OTHER; note = 2'-O-methyluridine-3'-phosphate
  modified_base 21: mod_base = OTHER; note = 2'-O-methylguanosine-3'- phosphorothioate
  modified_base 22: mod_base = OTHER; note = 2'-O-methyluridine-3'-phosphorothioate
  modified_base 23: mod_base = OTHER; note = 2'-O-methylcytidine-3'-phosphate
aggccgcgcacgtcctccatgtc

SEQ ID NO: 472 - RNA, 23 nt, synthetic construct
  source 1..23: mol_type = other RNA; note = Description of Artificial Sequence: Synthetic oligonucleotide
  modified_base 1: mod_base = OTHER; note = 2'-O-methyladenosine-3'- phosphorothioate
  modified_base 2: mod_base = OTHER; note = 2'-fluorocytidine-3'-phosphorothioate
  modified_base 3: mod_base = OTHER; note = 2'-O-methylguanosine-3'-phosphate
  modified_base 4: mod_base = OTHER; note = 2'-O-methylguanosine-3'-phosphate
  modified_base 5: mod_base = OTHER; note = 2'-O-methylcytidine-3'-phosphate
  modified_base 6: mod_base = OTHER; note = 2'-fluorocytidine-3'-phosphate
  modified_base 7: mod_base = OTHER; note = 2'-O-methylguanosine-3'-phosphate
  modified_base 8: mod_base = OTHER; note = 2'-fluorocytidine-3'-phosphate
  modified_base 9: mod_base = OTHER; note = 2'-fluoroguanosine-3'-phosphate
  modified_base 10: mod_base = OTHER; note = 2'-O-methylcytidine-3'-phosphate
  modified_base 11: mod_base = OTHER; note = 2'-O-methyladenosine-3'-phosphate
  modified_base 12: mod_base = OTHER; note = 2'-O-methylcytidine-3'-phosphate
  modified_base 13: mod_base = OTHER; note = 2'-O-methylguanosine-3'-phosphate
  modified_base 14: mod_base = OTHER; note = 2'-fluorouridine-3'-phosphate
  modified_base 15: mod_base = OTHER; note = 2'-O-methylcytidine-3'-phosphate
  modified_base 16: mod_base = OTHER; note = 2'-fluorocytidine-3'-phosphate
  modified_base 17: mod_base = OTHER; note = 2'-O-methyluridine-3'-phosphate
  modified_base 18: mod_base = OTHER; note = 2'-O-methylcytidine-3'-phosphate
  modified_base 19: mod_base = OTHER; note = 2'-O-methylcytidine-3'-phosphate
  modified_base 20: mod_base = OTHER; note = 2'-O-methyladenosine-3'-phosphate
  modified_base 21: mod_base = OTHER; note = 2'-O-methyluridine-3'-phosphorothioate
  modified_base 22: mod_base = OTHER; note = 2'-O-methylguanosine-3'- phosphorothioate
  modified_base 23: mod_base = OTHER; note = 2'-O-methyluridine-3'-phosphate
acggccgcgcacgtcctccatgt

SEQ ID NO: 473 - RNA, 23 nt, synthetic construct
  source 1..23: mol_type = other RNA; note = Description of Artificial Sequence: Synthetic oligonucleotide
  modified_base 1: mod_base = OTHER; note = 2'-O-methyladenosine-3'- phosphorothioate
  modified_base 2: mod_base = OTHER; note = 2'-fluoroguanosine-3'-phosphorothioate
  modified_base 3: mod_base = OTHER; note = 2'-O-methylcytidine-3'-phosphate
  modified_base 4: mod_base = OTHER; note = 2'-O-methylguanosine-3'-phosphate
  modified_base 5: mod_base = OTHER; note = 2'-O-methylguanosine-3'-phosphate
  modified_base 6: mod_base = OTHER; note = 2'-fluorocytidine-3'-phosphate
  modified_base 7: mod_base = OTHER; note = 2'-O-methylcytidine-3'-phosphate
  modified_base 8: mod_base = OTHER; note = 2'-fluoroguanosine-3'-phosphate
  modified_base 9: mod_base = OTHER; note = 2'-fluorocytidine-3'-phosphate
  modified_base 10: mod_base = OTHER; note = 2'-O-methylguanosine-3'-phosphate
  modified_base 11: mod_base = OTHER; note = 2'-O-methylcytidine-3'-phosphate
  modified_base 12: mod_base = OTHER; note = 2'-O-methyladenosine-3'-phosphate
  modified_base 13: mod_base = OTHER; note = 2'-O-methylcytidine-3'-phosphate
  modified_base 14: mod_base = OTHER; note = 2'-fluoroguanosine-3'-phosphate
  modified_base 15: mod_base = OTHER; note = 2'-O-methyluridine-3'-phosphate
  modified_base 16: mod_base = OTHER; note = 2'-fluorocytidine-3'-phosphate
  modified_base 17: mod_base = OTHER; note = 2'-O-methylcytidine-3'-phosphate
  modified_base 18: mod_base = OTHER; note = 2'-O-methyluridine-3'-phosphate
  modified_base 19: mod_base = OTHER; note = 2'-O-methylcytidine-3'-phosphate
  modified_base 20: mod_base = OTHER; note = 2'-O-methylcytidine-3'-phosphate
  modified_base 21: mod_base = OTHER; note = 2'-O-methyladenosine-3'- phosphorothioate
  modified_base 22: mod_base = OTHER; note = 2'-O-methyluridine-3'-phosphorothioate
  modified_base 23: mod_base = OTHER; note = 2'-O-methylguanosine-3'-phosphate
agcggccgcgcacgtcctccatg

SEQ ID NO: 474 - RNA, 23 nt, synthetic construct
  source 1..23: mol_type = other RNA; note = Description of Artificial Sequence: Synthetic oligonucleotide
  modified_base 1: mod_base = OTHER; note = 2'-O-methyladenosine-3'- phosphorothioate
  modified_base 2: mod_base = OTHER; note = 2'-fluoroguanosine-3'-phosphorothioate
  modified_base 3: mod_base = OTHER; note = 2'-O-methylguanosine-3'-phosphate
  modified_base 4: mod_base = OTHER; note = 2'-O-methylcytidine-3'-phosphate
  modified_base 5: mod_base = OTHER; note = 2'-O-methylguanosine-3'-phosphate
  modified_base 6: mod_base = OTHER; note = 2'-fluoroguanosine-3'-phosphate
  modified_base 7: mod_base = OTHER; note = 2'-O-methylcytidine-3'-phosphate
  modified_base 8: mod_base = OTHER; note = 2'-fluorocytidine-3'-phosphate
  modified_base 9: mod_base = OTHER; note = 2'-fluoroguanosine-3'-phosphate
  modified_base 10: mod_base = OTHER; note = 2'-O-methylcytidine-3'-phosphate
  modified_base 11: mod_base = OTHER; note = 2'-O-methylguanosine-3'-phosphate
  modified_base 12: mod_base = OTHER; note = 2'-O-methylcytidine-3'-phosphate
  modified_base 13: mod_base = OTHER; note = 2'-O-methyladenosine-3'-phosphate
  modified_base 14: mod_base = OTHER; note = 2'-fluorocytidine-3'-phosphate
  modified_base 15: mod_base = OTHER; note = 2'-O-methylguanosine-3'-phosphate
  modified_base 16: mod_base = OTHER; note = 2'-fluorouridine-3'-phosphate
  modified_base 17: mod_base = OTHER; note = 2'-O-methylcytidine-3'-phosphate
  modified_base 18: mod_base = OTHER; note = 2'-O-methylcytidine-3'-phosphate
  modified_base 19: mod_base = OTHER; note = 2'-O-methyluridine-3'-phosphate
  modified_base 20: mod_base = OTHER; note = 2'-O-methylcytidine-3'-phosphate
  modified_base 21: mod_base = OTHER; note = 2'-O-methylcytidine-3'- phosphorothioate
  modified_base 22: mod_base = OTHER; note = 2'-O-methyladenosine-3'- phosphorothioate
  modified_base 23: mod_base = OTHER; note = 2'-O-methyluridine-3'-phosphate
aggcggccgcgcacgtcctccat

SEQ ID NO: 475 - RNA, 23 nt, synthetic construct
  source 1..23: mol_type = other RNA; note = Description of Artificial Sequence: Synthetic oligonucleotide
  modified_base 1: mod_base = OTHER; note = 2'-O-methyladenosine-3'- phosphorothioate
  modified_base 2: mod_base = OTHER; note = 2'-fluoroadenosine-3'-phosphorothioate
  modified_base 3: mod_base = OTHER; note = 2'-O-methylguanosine-3'-phosphate
  modified_base 4: mod_base = OTHER; note = 2'-O-methylguanosine-3'-phosphate
  modified_base 5: mod_base = OTHER; note = 2'-O-methylcytidine-3'-phosphate
  modified_base 6: mod_base = OTHER; note = 2'-fluoroguanosine-3'-phosphate
  modified_base 7: mod_base = OTHER; note = 2'-O-methylguanosine-3'-phosphate
  modified_base 8: mod_base = OTHER; note = 2'-fluorocytidine-3'-phosphate
  modified_base 9: mod_base = OTHER; note = 2'-fluorocytidine-3'-phosphate
  modified_base 10: mod_base = OTHER; note = 2'-O-methylguanosine-3'-phosphate
  modified_base 11: mod_base = OTHER; note = 2'-O-methylcytidine-3'-phosphate
  modified_base 12: mod_base = OTHER; note = 2'-O-methylguanosine-3'-phosphate
  modified_base 13: mod_base = OTHER; note = 2'-O-methylcytidine-3'-phosphate
  modified_base 14: mod_base = OTHER; note = 2'-fluoroadenosine-3'-phosphate
  modified_base 15: mod_base = OTHER; note = 2'-O-methylcytidine-3'-phosphate
  modified_base 16: mod_base = OTHER; note = 2'-fluoroguanosine-3'-phosphate
  modified_base 17: mod_base = OTHER; note = 2'-O-methyluridine-3'-phosphate
  modified_base 18: mod_base = OTHER; note = 2'-O-methylcytidine-3'-phosphate
  modified_base 19: mod_base = OTHER; note = 2'-O-methylcytidine-3'-phosphate
  modified_base 20: mod_base = OTHER; note = 2'-O-methyluridine-3'-phosphate
  modified_base 21: mod_base = OTHER; note = 2'-O-methylcytidine-3'- phosphorothioate
  modified_base 22: mod_base = OTHER; note = 2'-O-methylcytidine-3'- phosphorothioate
  modified_base 23: mod_base = OTHER; note = 2'-O-methyladenosine-3'-phosphate
aaggcggccgcgcacgtcctcca

SEQ ID NO: 476 - RNA, 23 nt, synthetic construct
  source 1..23: mol_type = other RNA; note = Description of Artificial Sequence: Synthetic oligonucleotide
  modified_base 1: mod_base = OTHER; note = 2'-O-methyladenosine-3'- phosphorothioate
  modified_base 2: mod_base = OTHER; note = 2'-fluorocytidine-3'-phosphorothioate
  modified_base 3: mod_base = OTHER; note = 2'-O-methyladenosine-3'-phosphate
  modified_base 4: mod_base = OTHER; note = 2'-O-methylguanosine-3'-phosphate
  modified_base 5: mod_base = OTHER; note = 2'-O-methylguanosine-3'-phosphate
  modified_base 6: mod_base = OTHER; note = 2'-fluorocytidine-3'-phosphate
  modified_base 7: mod_base = OTHER; note = 2'-O-methylguanosine-3'-phosphate
  modified_base 8: mod_base = OTHER; note = 2'-fluoroguanosine-3'-phosphate
  modified_base 9: mod_base = OTHER; note = 2'-fluorocytidine-3'-phosphate
  modified_base 10: mod_base = OTHER; note = 2'-O-methylcytidine-3'-phosphate
  modified_base 11: mod_base = OTHER; note = 2'-O-methylguanosine-3'-phosphate
  modified_base 12: mod_base = OTHER; note = 2'-O-methylcytidine-3'-phosphate
  modified_base 13: mod_base = OTHER; note = 2'-O-methylguanosine-3'-phosphate
  modified_base 14: mod_base = OTHER; note = 2'-fluorocytidine-3'-phosphate
  modified_base 15: mod_base = OTHER; note = 2'-O-methyladenosine-3'-phosphate
  modified_base 16: mod_base = OTHER; note = 2'-fluorocytidine-3'-phosphate
  modified_base 17: mod_base = OTHER; note = 2'-O-methylguanosine-3'-phosphate
  modified_base 18: mod_base = OTHER; note = 2'-O-methyluridine-3'-phosphate
  modified_base 19: mod_base = OTHER; note = 2'-O-methylcytidine-3'-phosphate
  modified_base 20: mod_base = OTHER; note = 2'-O-methylcytidine-3'-phosphate
  modified_base 21: mod_base = OTHER; note = 2'-O-methyluridine-3'-phosphorothioate
  modified_base 22: mod_base = OTHER; note = 2'-O-methylcytidine-3'- phosphorothioate
  modified_base 23: mod_base = OTHER; note = 2'-O-methylcytidine-3'-phosphate
acaggcggccgcgcacgtcctcc

SEQ ID NO: 477 - RNA, 23 nt, synthetic construct
  source 1..23: mol_type = other RNA; note = Description of Artificial Sequence: Synthetic oligonucleotide
  modified_base 1: mod_base = OTHER; note = 2'-O-methyladenosine-3'- phosphorothioate
  modified_base 2: mod_base = OTHER; note = 2'-fluorocytidine-3'-phosphorothioate
  modified_base 3: mod_base = OTHER; note = 2'-O-methylcytidine-3'-phosphate
  modified_base 4: mod_base = OTHER; note = 2'-O-methyladenosine-3'-phosphate
  modified_base 5: mod_base = OTHER; note = 2'-O-methylguanosine-3'-phosphate
  modified_base 6: mod_base = OTHER; note = 2'-fluoroguanosine-3'-phosphate
  modified_base 7: mod_base = OTHER; note = 2'-O-methylcytidine-3'-phosphate
  modified_base 8: mod_base = OTHER; note = 2'-fluoroguanosine-3'-phosphate
  modified_base 9: mod_base = OTHER; note = 2'-fluoroguanosine-3'-phosphate
  modified_base 10: mod_base = OTHER; note = 2'-O-methylcytidine-3'-phosphate
  modified_base 11: mod_base = OTHER; note = 2'-O-methylcytidine-3'-phosphate
  modified_base 12: mod_base = OTHER; note = 2'-O-methylguanosine-3'-phosphate
  modified_base 13: mod_base = OTHER; note = 2'-O-methylcytidine-3'-phosphate
  modified_base 14: mod_base = OTHER; note = 2'-fluoroguanosine-3'-phosphate
  modified_base 15: mod_base = OTHER; note = 2'-O-methylcytidine-3'-phosphate
  modified_base 16: mod_base = OTHER; note = 2'-fluoroadenosine-3'-phosphate
  modified_base 17: mod_base = OTHER; note = 2'-O-methylcytidine-3'-phosphate
  modified_base 18: mod_base = OTHER; note = 2'-O-methylguanosine-3'-phosphate
  modified_base 19: mod_base = OTHER; note = 2'-O-methyluridine-3'-phosphate
  modified_base 20: mod_base = OTHER; note = 2'-O-methylcytidine-3'-phosphate
  modified_base 21: mod_base = OTHER; note = 2'-O-methylcytidine-3'- phosphorothioate
  modified_base 22: mod_base = OTHER; note = 2'-O-methyluridine-3'-phosphorothioate
  modified_base 23: mod_base = OTHER; note = 2'-O-methylcytidine-3'-phosphate
accaggcggccgcgcacgtcctc

SEQ ID NO: 478 - RNA, 23 nt, synthetic construct
  source 1..23: mol_type = other RNA; note = Description of Artificial Sequence: Synthetic oligonucleotide
  modified_base 1: mod_base = OTHER; note = 2'-O-methyladenosine-3'- phosphorothioate
  modified_base 2: mod_base = OTHER; note = 2'-fluoroadenosine-3'-phosphorothioate
  modified_base 3: mod_base = OTHER; note = 2'-O-methylcytidine-3'-phosphate
  modified_base 4: mod_base = OTHER; note = 2'-O-methylcytidine-3'-phosphate
  modified_base 5: mod_base = OTHER; note = 2'-O-methyladenosine-3'-phosphate
  modified_base 6: mod_base = OTHER; note = 2'-fluoroguanosine-3'-phosphate
  modified_base 7: mod_base = OTHER; note = 2'-O-methylguanosine-3'-phosphate
  modified_base 8: mod_base = OTHER; note = 2'-fluorocytidine-3'-phosphate
  modified_base 9: mod_base = OTHER; note = 2'-fluoroguanosine-3'-phosphate
  modified_base 10: mod_base = OTHER; note = 2'-O-methylguanosine-3'-phosphate
  modified_base 11: mod_base = OTHER; note = 2'-O-methylcytidine-3'-phosphate
  modified_base 12: mod_base = OTHER; note = 2'-O-methylcytidine-3'-phosphate
  modified_base 13: mod_base = OTHER; note = 2'-O-methylguanosine-3'-phosphate
  modified_base 14: mod_base = OTHER; note = 2'-fluorocytidine-3'-phosphate
  modified_base 15: mod_base = OTHER; note = 2'-O-methylguanosine-3'-phosphate
  modified_base 16: mod_base = OTHER; note = 2'-fluorocytidine-3'-phosphate
  modified_base 17: mod_base = OTHER; note = 2'-O-methyladenosine-3'-phosphate
  modified_base 18: mod_base = OTHER; note = 2'-O-methylcytidine-3'-phosphate
  modified_base 19: mod_base = OTHER; note = 2'-O-methylguanosine-3'-phosphate
  modified_base 20: mod_base = OTHER; note = 2'-O-methyluridine-3'-phosphate
  modified_base 21: mod_base = OTHER; note = 2'-O-methylcytidine-3'- phosphorothioate
  modified_base 22: mod_base = OTHER; note = 2'-O-methylcytidine-3'- phosphorothioate
  modified_base 23: mod_base = OTHER; note = 2'-O-methyluridine-3'-phosphate
aaccaggcggccgcgcacgtcct

SEQ ID NO: 479 - RNA, 23 nt, synthetic construct
  source 1..23: mol_type = other RNA; note = Description of Artificial Sequence: Synthetic oligonucleotide
  modified_base 1: mod_base = OTHER; note = 2'-O-methyladenosine-3'- phosphorothioate
  modified_base 2: mod_base = OTHER; note = 2'-fluorocytidine-3'-phosphorothioate
  modified_base 3: mod_base = OTHER; note = 2'-O-methyladenosine-3'-phosphate
  modified_base 4: mod_base = OTHER; note = 2'-O-methylcytidine-3'-phosphate
  modified_base 5: mod_base = OTHER; note = 2'-O-methylcytidine-3'-phosphate
  modified_base 6: mod_base = OTHER; note = 2'-fluoroadenosine-3'-phosphate
  modified_base 7: mod_base = OTHER; note = 2'-O-methylguanosine-3'-phosphate
  modified_base 8: mod_base = OTHER; note = 2'-fluoroguanosine-3'-phosphate
  modified_base 9: mod_base = OTHER; note = 2'-fluorocytidine-3'-phosphate
  modified_base 10: mod_base = OTHER; note = 2'-O-methylguanosine-3'-phosphate
  modified_base 11: mod_base = OTHER; note = 2'-O-methylguanosine-3'-phosphate
  modified_base 12: mod_base = OTHER; note = 2'-O-methylcytidine-3'-phosphate
  modified_base 13: mod_base = OTHER; note = 2'-O-methylcytidine-3'-phosphate
  modified_base 14: mod_base = OTHER; note = 2'-fluoroguanosine-3'-phosphate
  modified_base 15: mod_base = OTHER; note = 2'-O-methylcytidine-3'-phosphate
  modified_base 16: mod_base = OTHER; note = 2'-fluoroguanosine-3'-phosphate
  modified_base 17: mod_base = OTHER; note = 2'-O-methylcytidine-3'-phosphate
  modified_base 18: mod_base = OTHER; note = 2'-O-methyladenosine-3'-phosphate
  modified_base 19: mod_base = OTHER; note = 2'-O-methylcytidine-3'-phosphate
  modified_base 20: mod_base = OTHER; note = 2'-O-methylguanosine-3'-phosphate
  modified_base 21: mod_base = OTHER; note = 2'-O-methyluridine-3'-phosphorothioate
  modified_base 22: mod_base = OTHER; note = 2'-O-methylcytidine-3'- phosphorothioate
  modified_base 23: mod_base = OTHER; note = 2'-O-methylcytidine-3'-phosphate
acaccaggcggccgcgcacgtcc

SEQ ID NO: 480 - RNA, 23 nt, synthetic construct
  source 1..23: mol_type = other RNA; note = Description of Artificial Sequence: Synthetic oligonucleotide
  modified_base 1: mod_base = OTHER; note = 2'-O-methyladenosine-3'- phosphorothioate
  modified_base 2: mod_base = OTHER; note = 2'-fluoroguanosine-3'-phosphorothioate
  modified_base 3: mod_base = OTHER; note = 2'-O-methylcytidine-3'-phosphate
  modified_base 4: mod_base = OTHER; note = 2'-O-methyladenosine-3'-phosphate
  modified_base 5: mod_base = OTHER; note = 2'-O-methylcytidine-3'-phosphate
  modified_base 6: mod_base = OTHER; note = 2'-fluorocytidine-3'-phosphate
  modified_base 7: mod_base = OTHER; note = 2'-O-methyladenosine-3'-phosphate
  modified_base 8: mod_base = OTHER; note = 2'-fluoroguanosine-3'-phosphate
  modified_base 9: mod_base = OTHER; note = 2'-fluoroguanosine-3'-phosphate
  modified_base 10: mod_base = OTHER; note = 2'-O-methylcytidine-3'-phosphate
  modified_base 11: mod_base = OTHER; note = 2'-O-methylguanosine-3'-phosphate
  modified_base 12: mod_base = OTHER; note = 2'-O-methylguanosine-3'-phosphate
  modified_base 13: mod_base = OTHER; note = 2'-O-methylcytidine-3'-phosphate
  modified_base 14: mod_base = OTHER; note = 2'-fluorocytidine-3'-phosphate
  modified_base 15: mod_base = OTHER; note = 2'-O-methylguanosine-3'-phosphate
  modified_base 16: mod_base = OTHER; note = 2'-fluorocytidine-3'-phosphate
  modified_base 17: mod_base = OTHER; note = 2'-O-methylguanosine-3'-phosphate
  modified_base 18: mod_base = OTHER; note = 2'-O-methylcytidine-3'-phosphate
  modified_base 19: mod_base = OTHER; note = 2'-O-methyladenosine-3'-phosphate
  modified_base 20: mod_base = OTHER; note = 2'-O-methylcytidine-3'-phosphate
  modified_base 21: mod_base = OTHER; note = 2'-O-methylguanosine-3'- phosphorothioate
  modified_base 22: mod_base = OTHER; note = 2'-O-methyluridine-3'-phosphorothioate
  modified_base 23: mod_base = OTHER; note = 2'-O-methylcytidine-3'-phosphate
agcaccaggcggccgcgcacgtc

SEQ ID NO: 481 - RNA, 23 nt, synthetic construct
  source 1..23: mol_type = other RNA; note = Description of Artificial Sequence: Synthetic oligonucleotide
  modified_base 1: mod_base = OTHER; note = 2'-O-methyladenosine-3'- phosphorothioate
  modified_base 2: mod_base = OTHER; note = 2'-fluorouridine -3'-phosphorothioate
  modified_base 3: mod_base = OTHER; note = 2'-O-methylguanosine-3'-phosphate
  modified_base 4: mod_base = OTHER; note = 2'-O-methylcytidine-3'-phosphate
  modified_base 5: mod_base = OTHER; note = 2'-O-methyladenosine-3'-phosphate
  modified_base 6: mod_base = OTHER; note = 2'-fluorocytidine-3'-phosphate
  modified_base 7: mod_base = OTHER; note = 2'-O-methylcytidine-3'-phosphate
  modified_base 8: mod_base = OTHER; note = 2'-fluoroadenosine-3'-phosphate
  modified_base 9: mod_base = OTHER; note = 2'-fluoroguanosine-3'-phosphate
  modified_base 10: mod_base = OTHER; note = 2'-O-methylguanosine-3'-phosphate
  modified_base 11: mod_base = OTHER; note = 2'-O-methylcytidine-3'-phosphate
  modified_base 12: mod_base = OTHER; note = 2'-O-methylguanosine-3'-phosphate
  modified_base 13: mod_base = OTHER; note = 2'-O-methylguanosine-3'-phosphate
  modified_base 14: mod_base = OTHER; note = 2'-fluorocytidine-3'-phosphate
  modified_base 15: mod_base = OTHER; note = 2'-O-methylcytidine-3'-phosphate
  modified_base 16: mod_base = OTHER; note = 2'-fluoroguanosine-3'-phosphate
  modified_base 17: mod_base = OTHER; note = 2'-O-methylcytidine-3'-phosphate
  modified_base 18: mod_base = OTHER; note = 2'-O-methylguanosine-3'-phosphate
  modified_base 19: mod_base = OTHER; note = 2'-O-methylcytidine-3'-phosphate
  modified_base 20: mod_base = OTHER; note = 2'-O-methyladenosine-3'-phosphate
  modified_base 21: mod_base = OTHER; note = 2'-O-methylcytidine-3'- phosphorothioate
  modified_base 22: mod_base = OTHER; note = 2'-O-methylguanosine-3'- phosphorothioate
  modified_base 23: mod_base = OTHER; note = 2'-O-methyluridine-3'-phosphate
atgcaccaggcggccgcgcacgt

SEQ ID NO: 482 - RNA, 23 nt, synthetic construct
  source 1..23: mol_type = other RNA; note = Description of Artificial Sequence: Synthetic oligonucleotide
  modified_base 1: mod_base = OTHER; note = 2'-O-methyladenosine-3'- phosphorothioate
  modified_base 2: mod_base = OTHER; note = 2'-fluoroguanosine-3'-phosphorothioate
  modified_base 3: mod_base = OTHER; note = 2'-O-methyluridine-3'-phosphate
  modified_base 4: mod_base = OTHER; note = 2'-O-methyladenosine-3'-phosphate
  modified_base 5: mod_base = OTHER; note = 2'-O-methylcytidine-3'-phosphate
  modified_base 6: mod_base = OTHER; note = 2'-fluorouridine-3'-phosphate
  modified_base 7: mod_base = OTHER; note = 2'-O-methylguanosine-3'-phosphate
  modified_base 8: mod_base = OTHER; note = 2'-fluorocytidine-3'-phosphate
  modified_base 9: mod_base = OTHER; note = 2'-fluoroadenosine-3'-phosphate
  modified_base 10: mod_base = OTHER; note = 2'-O-methylcytidine-3'-phosphate
  modified_base 11: mod_base = OTHER; note = 2'-O-methylcytidine-3'-phosphate
  modified_base 12: mod_base = OTHER; note = 2'-O-methyladenosine-3'-phosphate
  modified_base 13: mod_base = OTHER; note = 2'-O-methylguanosine-3'-phosphate
  modified_base 14: mod_base = OTHER; note = 2'-fluoroguanosine-3'-phosphate
  modified_base 15: mod_base = OTHER; note = 2'-O-methylcytidine-3'-phosphate
  modified_base 16: mod_base = OTHER; note = 2'-fluoroguanosine-3'-phosphate
  modified_base 17: mod_base = OTHER; note = 2'-O-methylguanosine-3'-phosphate
  modified_base 18: mod_base = OTHER; note = 2'-O-methylcytidine-3'-phosphate
  modified_base 19: mod_base = OTHER; note = 2'-O-methylcytidine-3'-phosphate
  modified_base 20: mod_base = OTHER; note = 2'-O-methylguanosine-3'-phosphate
  modified_base 21: mod_base = OTHER; note = 2'-O-methylcytidine-3'- phosphorothioate
  modified_base 22: mod_base = OTHER; note = 2'-O-methyladenosine-3'- phosphorothioate
  modified_base 23: mod_base = OTHER; note = 2'-O-methylcytidine-3'-phosphate
agtactgcaccaggcggccgcac

SEQ ID NO: 483 - RNA, 23 nt, synthetic construct
  source 1..23: mol_type = other RNA; note = Description of Artificial Sequence: Synthetic oligonucleotide
  modified_base 1: mod_base = OTHER; note = 2'-O-methyladenosine-3'- phosphorothioate
  modified_base 2: mod_base = OTHER; note = 2'-fluorocytidine-3'-phosphorothioate
  modified_base 3: mod_base = OTHER; note = 2'-O-methylcytidine-3'-phosphate
  modified_base 4: mod_base = OTHER; note = 2'-O-methylguanosine-3'-phosphate
  modified_base 5: mod_base = OTHER; note = 2'-O-methylcytidine-3'-phosphate
  modified_base 6: mod_base = OTHER; note = 2'-fluoroguanosine-3'-phosphate
  modified_base 7: mod_base = OTHER; note = 2'-O-methylguanosine-3'-phosphate
  modified_base 8: mod_base = OTHER; note = 2'-fluorouridine-3'-phosphate
  modified_base 9: mod_base = OTHER; note = 2'-fluoroadenosine-3'-phosphate
  modified_base 10: mod_base = OTHER; note = 2'-O-methylcytidine-3'-phosphate
  modified_base 11: mod_base = OTHER; note = 2'-O-methyluridine-3'-phosphate
  modified_base 12: mod_base = OTHER; note = 2'-O-methylguanosine-3'-phosphate
  modified_base 13: mod_base = OTHER; note = 2'-O-methylcytidine-3'-phosphate
  modified_base 14: mod_base = OTHER; note = 2'-fluoroadenosine-3'-phosphate
  modified_base 15: mod_base = OTHER; note = 2'-O-methylcytidine-3'-phosphate
  modified_base 16: mod_base = OTHER; note = 2'-fluorocytidine-3'-phosphate
  modified_base 17: mod_base = OTHER; note = 2'-O-methyladenosine-3'-phosphate
  modified_base 18: mod_base = OTHER; note = 2'-O-methylguanosine-3'-phosphate
  modified_base 19: mod_base = OTHER; note = 2'-O-methylguanosine-3'-phosphate
  modified_base 20: mod_base = OTHER; note = 2'-O-methylcytidine-3'-phosphate
  modified_base 21: mod_base = OTHER; note = 2'-O-methylguanosine-3'- phosphorothioate
  modified_base 22: mod_base = OTHER; note = 2'-O-methylguanosine-3'- phosphorothioate
  modified_base 23: mod_base = OTHER; note = 2'-O-methylcytidine-3'-phosphate
accgcggtactgcaccaggcggc

SEQ ID NO: 484 - RNA, 23 nt, synthetic construct
  source 1..23: mol_type = other RNA; note = Description of Artificial Sequence: Synthetic oligonucleotide
  modified_base 1: mod_base = OTHER; note = 2'-O-methyladenosine-3'- phosphorothioate
  modified_base 2: mod_base = OTHER; note = 2'-fluorocytidine-3'-phosphorothioate
  modified_base 3: mod_base = OTHER; note = 2'-O-methylcytidine-3'-phosphate
  modified_base 4: mod_base = OTHER; note = 2'-O-methylguanosine-3'-phosphate
  modified_base 5: mod_base = OTHER; note = 2'-O-methyladenosine-3'-phosphate
  modified_base 6: mod_base = OTHER; note = 2'-fluoroguanosine-3'-phosphate
  modified_base 7: mod_base = OTHER; note = 2'-O-methylcytidine-3'-phosphate
  modified_base 8: mod_base = OTHER; note = 2'-fluoroadenosine-3'-phosphate
  modified_base 9: mod_base = OTHER; note = 2'-fluorouridine-3'-phosphate
  modified_base 10: mod_base = OTHER; note = 2'-O-methylguanosine-3'-phosphate
  modified_base 11: mod_base = OTHER; note = 2'-O-methylguanosine-3'-phosphate
  modified_base 12: mod_base = OTHER; note = 2'-O-methylcytidine-3'-phosphate
  modified_base 13: mod_base = OTHER; note = 2'-O-methylcytidine-3'-phosphate
  modified_base 14: mod_base = OTHER; note = 2'-fluorouridine-3'-phosphate
  modified_base 15: mod_base = OTHER; note = 2'-O-methylguanosine-3'-phosphate
  modified_base 16: mod_base = OTHER; note = 2'-fluorocytidine-3'-phosphate
  modified_base 17: mod_base = OTHER; note = 2'-O-methyladenosine-3'-phosphate
  modified_base 18: mod_base = OTHER; note = 2'-O-methylcytidine-3'-phosphate
  modified_base 19: mod_base = OTHER; note = 2'-O-methylcytidine-3'-phosphate
  modified_base 20: mod_base = OTHER; note = 2'-O-methyluridine-3'-phosphate
  modified_base 21: mod_base = OTHER; note = 2'-O-methylcytidine-3'- phosphorothioate
  modified_base 22: mod_base = OTHER; note = 2'-O-methylguanosine-3'- phosphorothioate
  modified_base 23: mod_base = OTHER; note = 2'-O-methylcytidine-3'-phosphate
accgagcatggcctgcacctcgc

SEQ ID NO: 485 - RNA, 23 nt, synthetic construct
  source 1..23: mol_type = other RNA; note = Description of Artificial Sequence: Synthetic oligonucleotide
  modified_base 1: mod_base = OTHER; note = 2'-O-methyladenosine-3'- phosphorothioate
  modified_base 2: mod_base = OTHER; note = 2'-fluoroguanosine-3'-phosphorothioate
  modified_base 3: mod_base = OTHER; note = 2'-O-methyluridine-3'-phosphate
  modified_base 4: mod_base = OTHER; note = 2'-O-methylguanosine-3'-phosphate
  modified_base 5: mod_base = OTHER; note = 2'-O-methylcytidine-3'-phosphate
  modified_base 6: mod_base = OTHER; note = 2'-fluorouridine-3'-phosphate
  modified_base 7: mod_base = OTHER; note = 2'-O-methylcytidine-3'-phosphate
  modified_base 8: mod_base = OTHER; note = 2'-fluorouridine-3'-phosphate
  modified_base 9: mod_base = OTHER; note = 2'-fluoroguanosine-3'-phosphate
  modified_base 10: mod_base = OTHER; note = 2'-O-methylguanosine-3'-phosphate
  modified_base 11: mod_base = OTHER; note = 2'-O-methylcytidine-3'-phosphate
  modified_base 12: mod_base = OTHER; note = 2'-O-methylcytidine-3'-phosphate
  modified_base 13: mod_base = OTHER; note = 2'-O-methylguanosine-3'-phosphate
  modified_base 14: mod_base = OTHER; note = 2'-fluoroadenosine-3'-phosphate
  modified_base 15: mod_base = OTHER; note = 2'-O-methylguanosine-3'-phosphate
  modified_base 16: mod_base = OTHER; note = 2'-fluorocytidine-3'-phosphate
  modified_base 17: mod_base = OTHER; note = 2'-O-methyladenosine-3'-phosphate
  modified_base 18: mod_base = OTHER; note = 2'-O-methyluridine-3'-phosphate
  modified_base 19: mod_base = OTHER; note = 2'-O-methylguanosine-3'-phosphate
  modified_base 20: mod_base = OTHER; note = 2'-O-methylguanosine-3'-phosphate
  modified_base 21: mod_base = OTHER; note = 2'-O-methylcytidine-3'- phosphorothioate
  modified_base 22: mod_base = OTHER; note = 2'-O-methylcytidine-3'- phosphorothioate
  modified_base 23: mod_base = OTHER; note = 2'-O-methyluridine-3'-phosphate
agtgctctggccgagcatggcct

SEQ ID NO: 486 - RNA, 23 nt, synthetic construct
  source 1..23: mol_type = other RNA; note = Description of Artificial Sequence: Synthetic oligonucleotide
  modified_base 1: mod_base = OTHER; note = 2'-O-methyladenosine-3'- phosphorothioate
  modified_base 2: mod_base = OTHER; note = 2'-fluoroadenosine-3'-phosphorothioate
  modified_base 3: mod_base = OTHER; note = 2'-O-methylguanosine-3'-phosphate
  modified_base 4: mod_base = OTHER; note = 2'-O-methylcytidine-3'-phosphate
  modified_base 5: mod_base = OTHER; note = 2'-O-methyluridine-3'-phosphate
  modified_base 6: mod_base = OTHER; note = 2'-fluorocytidine-3'-phosphate
  modified_base 7: mod_base = OTHER; note = 2'-O-methylcytidine-3'-phosphate
  modified_base 8: mod_base = OTHER; note = 2'-fluorouridine-3'-phosphate
  modified_base 9: mod_base = OTHER; note = 2'-fluorocytidine-3'-phosphate
  modified_base 10: mod_base = OTHER; note = 2'-O-methylguanosine-3'-phosphate
  modified_base 11: mod_base = OTHER; note = 2'-O-methylguanosine-3'-phosphate
  modified_base 12: mod_base = OTHER; note = 2'-O-methyluridine-3'-phosphate
  modified_base 13: mod_base = OTHER; note = 2'-O-methylguanosine-3'-phosphate
  modified_base 14: mod_base = OTHER; note = 2'-fluorocytidine-3'-phosphate
  modified_base 15: mod_base = OTHER; note = 2'-O-methyluridine-3'-phosphate
  modified_base 16: mod_base = OTHER; note = 2'-fluorocytidine-3'-phosphate
  modified_base 17: mod_base = OTHER; note = 2'-O-methyluridine-3'-phosphate
  modified_base 18: mod_base = OTHER; note = 2'-O-methylguanosine-3'-phosphate
  modified_base 19: mod_base = OTHER; note = 2'-O-methylguanosine-3'-phosphate
  modified_base 20: mod_base = OTHER; note = 2'-O-methylcytidine-3'-phosphate
  modified_base 21: mod_base = OTHER; note = 2'-O-methylcytidine-3'- phosphorothioate
  modified_base 22: mod_base = OTHER; note = 2'-O-methylguanosine-3'- phosphorothioate
  modified_base 23: mod_base = OTHER; note = 2'-O-methyladenosine-3'-phosphate
aagctcctcggtgctctggccga

SEQ ID NO: 487 - RNA, 23 nt, synthetic construct
  source 1..23: mol_type = other RNA; note = Description of Artificial Sequence: Synthetic oligonucleotide
  modified_base 1: mod_base = OTHER; note = 2'-O-methyladenosine-3'- phosphorothioate
  modified_base 2: mod_base = OTHER; note = 2'-fluoroadenosine-3'-phosphorothioate
  modified_base 3: mod_base = OTHER; note = 2'-O-methylguanosine-3'-phosphate
  modified_base 4: mod_base = OTHER; note = 2'-O-methylguanosine-3'-phosphate
  modified_base 5: mod_base = OTHER; note = 2'-O-methylcytidine-3'-phosphate
  modified_base 6: mod_base = OTHER; note = 2'-fluoroguanosine-3'-phosphate
  modified_base 7: mod_base = OTHER; note = 2'-O-methyladenosine-3'-phosphate
  modified_base 8: mod_base = OTHER; note = 2'-fluoroguanosine-3'-phosphate
  modified_base 9: mod_base = OTHER; note = 2'-fluoroguanosine-3'-phosphate
  modified_base 10: mod_base = OTHER; note = 2'-O-methylcytidine-3'-phosphate
  modified_base 11: mod_base = OTHER; note = 2'-O-methylguanosine-3'-phosphate
  modified_base 12: mod_base = OTHER; note = 2'-O-methylcytidine-3'-phosphate
  modified_base 13: mod_base = OTHER; note = 2'-O-methyladenosine-3'-phosphate
  modified_base 14: mod_base = OTHER; note = 2'-fluorocytidine-3'-phosphate
  modified_base 15: mod_base = OTHER; note = 2'-O-methylcytidine-3'-phosphate
  modified_base 16: mod_base = OTHER; note = 2'-fluorocytidine-3'-phosphate
  modified_base 17: mod_base = OTHER; note = 2'-O-methylguanosine-3'-phosphate
  modified_base 18: mod_base = OTHER; note = 2'-O-methylcytidine-3'-phosphate
  modified_base 19: mod_base = OTHER; note = 2'-O-methyladenosine-3'-phosphate
  modified_base 20: mod_base = OTHER; note = 2'-O-methylguanosine-3'-phosphate
  modified_base 21: mod_base = OTHER; note = 2'-O-methylcytidine-3'- phosphorothioate
  modified_base 22: mod_base = OTHER; note = 2'-O-methyluridine-3'-phosphorothioate
  modified_base 23: mod_base = OTHER; note = 2'-O-methylcytidine-3'-phosphate
aaggcgaggcgcacccgcagctc

SEQ ID NO: 488 - RNA, 23 nt, synthetic construct
  source 1..23: mol_type = other RNA; note = Description of Artificial Sequence: Synthetic oligonucleotide
  modified_base 1: mod_base = OTHER; note = 2'-O-methyladenosine-3'- phosphorothioate
  modified_base 2: mod_base = OTHER; note = 2'-fluoroadenosine-3'-phosphorothioate
  modified_base 3: mod_base = OTHER; note = 2'-O-methylguanosine-3'-phosphate
  modified_base 4: mod_base = OTHER; note = 2'-O-methylguanosine-3'-phosphate
  modified_base 5: mod_base = OTHER; note = 2'-O-methyluridine-3'-phosphate
  modified_base 6: mod_base = OTHER; note = 2'-fluoroguanosine-3'-phosphate
  modified_base 7: mod_base = OTHER; note = 2'-O-methylguanosine-3'-phosphate
  modified_base 8: mod_base = OTHER; note = 2'-fluoroguanosine-3'-phosphate
  modified_base 9: mod_base = OTHER; note = 2'-fluoroadenosine-3'-phosphate
  modified_base 10: mod_base = OTHER; note = 2'-O-methylguanosine-3'-phosphate
  modified_base 11: mod_base = OTHER; note = 2'-O-methylguanosine-3'-phosphate
  modified_base 12: mod_base = OTHER; note = 2'-O-methylcytidine-3'-phosphate
  modified_base 13: mod_base = OTHER; note = 2'-O-methylguanosine-3'-phosphate
  modified_base 14: mod_base = OTHER; note = 2'-fluoroadenosine-3'-phosphate
  modified_base 15: mod_base = OTHER; note = 2'-O-methylguanosine-3'-phosphate
  modified_base 16: mod_base = OTHER; note = 2'-fluoroguanosine-3'-phosphate
  modified_base 17: mod_base = OTHER; note = 2'-O-methylcytidine-3'-phosphate
  modified_base 18: mod_base = OTHER; note = 2'-O-methylguanosine-3'-phosphate
  modified_base 19: mod_base = OTHER; note = 2'-O-methylcytidine-3'-phosphate
  modified_base 20: mod_base = OTHER; note = 2'-O-methyladenosine-3'-phosphate
  modified_base 21: mod_base = OTHER; note = 2'-O-methylcytidine-3'- phosphorothioate
  modified_base 22: mod_base = OTHER; note = 2'-O-methylcytidine-3'- phosphorothioate
  modified_base 23: mod_base = OTHER; note = 2'-O-methylcytidine-3'-phosphate
aaggtgggaggcgaggcgcaccc

SEQ ID NO: 489 - RNA, 23 nt, synthetic construct
  source 1..23: mol_type = other RNA; note = Description of Artificial Sequence: Synthetic oligonucleotide
  modified_base 1: mod_base = OTHER; note = 2'-O-methyladenosine-3'- phosphorothioate
  modified_base 2: mod_base = OTHER; note = 2'-fluoroguanosine-3'-phosphorothioate
  modified_base 3: mod_base = OTHER; note = 2'-O-methylcytidine-3'-phosphate
  modified_base 4: mod_base = OTHER; note = 2'-O-methyluridine-3'-phosphate
  modified_base 5: mod_base = OTHER; note = 2'-O-methyluridine-3'-phosphate
  modified_base 6: mod_base = OTHER; note = 2'-fluoroguanosine-3'-phosphate
  modified_base 7: mod_base = OTHER; note = 2'-O-methylcytidine-3'-phosphate
  modified_base 8: mod_base = OTHER; note = 2'-fluoroguanosine-3'-phosphate
  modified_base 9: mod_base = OTHER; note = 2'-fluorocytidine-3'-phosphate
  modified_base 10: mod_base = OTHER; note = 2'-O-methyladenosine-3'-phosphate
  modified_base 11: mod_base = OTHER; note = 2'-O-methylguanosine-3'-phosphate
  modified_base 12: mod_base = OTHER; note = 2'-O-methylguanosine-3'-phosphate
  modified_base 13: mod_base = OTHER; note = 2'-O-methyluridine-3'-phosphate
  modified_base 14: mod_base = OTHER; note = 2'-fluoroguanosine-3'-phosphate
  modified_base 15: mod_base = OTHER; note = 2'-O-methylguanosine-3'-phosphate
  modified_base 16: mod_base = OTHER; note = 2'-fluoroguanosine-3'-phosphate
  modified_base 17: mod_base = OTHER; note = 2'-O-methyladenosine-3'-phosphate
  modified_base 18: mod_base = OTHER; note = 2'-O-methylguanosine-3'-phosphate
  modified_base 19: mod_base = OTHER; note = 2'-O-methylguanosine-3'-phosphate
  modified_base 20: mod_base = OTHER; note = 2'-O-methylcytidine-3'-phosphate
  modified_base 21: mod_base = OTHER; note = 2'-O-methylguanosine-3'- phosphorothioate
  modified_base 22: mod_base = OTHER; note = 2'-O-methyladenosine-3'- phosphorothioate
  modified_base 23: mod_base = OTHER; note = 2'-O-methylguanosine-3'-phosphate
agcttgcgcaggtgggaggcgag

SEQ ID NO: 490 - RNA, 23 nt, synthetic construct
  source 1..23: mol_type = other RNA; note = Description of Artificial Sequence: Synthetic oligonucleotide
  modified_base 1: mod_base = OTHER; note = 2'-O-methyladenosine-3'- phosphorothioate
  modified_base 2: mod_base = OTHER; note = 2'-fluoroadenosine-3'-phosphorothioate
  modified_base 3: mod_base = OTHER; note = 2'-O-methylcytidine-3'-phosphate
  modified_base 4: mod_base = OTHER; note = 2'-O-methylguanosine-3'-phosphate
  modified_base 5: mod_base = OTHER; note = 2'-O-methylcytidine-3'-phosphate
  modified_base 6: mod_base = OTHER; note = 2'-fluoroadenosine-3'-phosphate
  modified_base 7: mod_base = OTHER; note = 2'-O-methylguanosine-3'-phosphate
  modified_base 8: mod_base = OTHER; note = 2'-fluorocytidine-3'-phosphate
  modified_base 9: mod_base = OTHER; note = 2'-fluorouridine-3'-phosphate
  modified_base 10: mod_base = OTHER; note = 2'-O-methyluridine-3'-phosphate
  modified_base 11: mod_base = OTHER; note = 2'-O-methylguanosine-3'-phosphate
  modified_base 12: mod_base = OTHER; note = 2'-O-methylcytidine-3'-phosphate
  modified_base 13: mod_base = OTHER; note = 2'-O-methylguanosine-3'-phosphate
  modified_base 14: mod_base = OTHER; note = 2'-fluorocytidine-3'-phosphate
  modified_base 15: mod_base = OTHER; note = 2'-O-methyladenosine-3'-phosphate
  modified_base 16: mod_base = OTHER; note = 2'-fluoroguanosine-3'-phosphate
  modified_base 17: mod_base = OTHER; note = 2'-O-methylguanosine-3'-phosphate
  modified_base 18: mod_base = OTHER; note = 2'-O-methyluridine-3'-phosphate
  modified_base 19: mod_base = OTHER; note = 2'-O-methylguanosine-3'-phosphate
  modified_base 20: mod_base = OTHER; note = 2'-O-methylguanosine-3'-phosphate
  modified_base 21: mod_base = OTHER; note = 2'-O-methylguanosine-3'- phosphorothioate
  modified_base 22: mod_base = OTHER; note = 2'-O-methyladenosine-3'- phosphorothioate
  modified_base 23: mod_base = OTHER; note = 2'-O-methylguanosine-3'-phosphate
aacgcagcttgcgcaggtgggag

SEQ ID NO: 491 - RNA, 23 nt, synthetic construct
  source 1..23: mol_type = other RNA; note = Description of Artificial Sequence: Synthetic oligonucleotide
  modified_base 1: mod_base = OTHER; note = 2'-O-methyladenosine-3'- phosphorothioate
  modified_base 2: mod_base = OTHER; note = 2'-fluorocytidine-3'-phosphorothioate
  modified_base 3: mod_base = OTHER; note = 2'-O-methylguanosine-3'-phosphate
  modified_base 4: mod_base = OTHER; note = 2'-O-methylcytidine-3'-phosphate
  modified_base 5: mod_base = OTHER; note = 2'-O-methyluridine-3'-phosphate
  modified_base 6: mod_base = OTHER; note = 2'-fluorouridine-3'-phosphate
  modified_base 7: mod_base = OTHER; note = 2'-O-methyladenosine-3'-phosphate
  modified_base 8: mod_base = OTHER; note = 2'-fluorocytidine-3'-phosphate
  modified_base 9: mod_base = OTHER; note = 2'-fluoroguanosine-3'-phosphate
  modified_base 10: mod_base = OTHER; note = 2'-O-methylcytidine-3'-phosphate
  modified_base 11: mod_base = OTHER; note = 2'-O-methyladenosine-3'-phosphate
  modified_base 12: mod_base = OTHER; note = 2'-O-methylguanosine-3'-phosphate
  modified_base 13: mod_base = OTHER; note = 2'-O-methylcytidine-3'-phosphate
  modified_base 14: mod_base = OTHER; note = 2'-fluorouridine-3'-phosphate
  modified_base 15: mod_base = OTHER; note = 2'-O-methyluridine-3'-phosphate
  modified_base 16: mod_base = OTHER; note = 2'-fluoroguanosine-3'-phosphate
  modified_base 17: mod_base = OTHER; note = 2'-O-methylcytidine-3'-phosphate
  modified_base 18: mod_base = OTHER; note = 2'-O-methylguanosine-3'-phosphate
  modified_base 19: mod_base = OTHER; note = 2'-O-methylcytidine-3'-phosphate
  modified_base 20: mod_base = OTHER; note = 2'-O-methyladenosine-3'-phosphate
  modified_base 21: mod_base = OTHER; note = 2'-O-methylguanosine-3'- phosphorothioate
  modified_base 22: mod_base = OTHER; note = 2'-O-methylguanosine-3'- phosphorothioate
  modified_base 23: mod_base = OTHER; note = 2'-O-methyluridine-3'-phosphate
acgcttacgcagcttgcgcaggt

SEQ ID NO: 492 - RNA, 23 nt, synthetic construct
  source 1..23: mol_type = other RNA; note = Description of Artificial Sequence: Synthetic oligonucleotide
  modified_base 1: mod_base = OTHER; note = 2'-O-methyladenosine-3'- phosphorothioate
  modified_base 2: mod_base = OTHER; note = 2'-fluoroadenosine-3'-phosphorothioate
  modified_base 3: mod_base = OTHER; note = 2'-O-methylguanosine-3'-phosphate
  modified_base 4: mod_base = OTHER; note = 2'-O-methylguanosine-3'-phosphate
  modified_base 5: mod_base = OTHER; note = 2'-O-methyladenosine-3'-phosphate
  modified_base 6: mod_base = OTHER; note = 2'-fluoroguanosine-3'-phosphate
  modified_base 7: mod_base = OTHER; note = 2'-O-methylcytidine-3'-phosphate
  modified_base 8: mod_base = OTHER; note = 2'-fluorocytidine-3'-phosphate
  modified_base 9: mod_base = OTHER; note = 2'-fluoroguanosine-3'-phosphate
  modified_base 10: mod_base = OTHER; note = 2'-O-methylcytidine-3'-phosphate
  modified_base 11: mod_base = OTHER; note = 2'-O-methyluridine-3'-phosphate
  modified_base 12: mod_base = OTHER; note = 2'-O-methyluridine-3'-phosphate
  modified_base 13: mod_base = OTHER; note = 2'-O-methyladenosine-3'-phosphate
  modified_base 14: mod_base = OTHER; note = 2'-fluorocytidine-3'-phosphate
  modified_base 15: mod_base = OTHER; note = 2'-O-methylguanosine-3'-phosphate
  modified_base 16: mod_base = OTHER; note = 2'-fluorocytidine-3'-phosphate
  modified_base 17: mod_base = OTHER; note = 2'-O-methyladenosine-3'-phosphate
  modified_base 18: mod_base = OTHER; note = 2'-O-methylguanosine-3'-phosphate
  modified_base 19: mod_base = OTHER; note = 2'-O-methylcytidine-3'-phosphate
  modified_base 20: mod_base = OTHER; note = 2'-O-methyluridine-3'-phosphate
  modified_base 21: mod_base = OTHER; note = 2'-O-methyluridine-3'-phosphorothioate
  modified_base 22: mod_base = OTHER; note = 2'-O-methylguanosine-3'- phosphorothioate
  modified_base 23: mod_base = OTHER; note = 2'-O-methylcytidine-3'-phosphate
aaggagccgcttacgcagcttgc

SEQ ID NO: 493 - RNA, 23 nt, synthetic construct
  source 1..23: mol_type = other RNA; note = Description of Artificial Sequence: Synthetic oligonucleotide
  modified_base 1: mod_base = OTHER; note = 2'-O-methyladenosine-3'- phosphorothioate
  modified_base 2: mod_base = OTHER; note = 2'-fluoroadenosine-3'-phosphorothioate
  modified_base 3: mod_base = OTHER; note = 2'-O-methyluridine-3'-phosphate
  modified_base 4: mod_base = OTHER; note = 2'-O-methylcytidine-3'-phosphate
  modified_base 5: mod_base = OTHER; note = 2'-O-methylguanosine-3'-phosphate
  modified_base 6: mod_base = OTHER; note = 2'-fluorocytidine-3'-phosphate
  modified_base 7: mod_base = OTHER; note = 2'-O-methylguanosine-3'-phosphate
  modified_base 8: mod_base = OTHER; note = 2'-fluoroguanosine-3'-phosphate
  modified_base 9: mod_base = OTHER; note = 2'-fluoroadenosine-3'-phosphate
  modified_base 10: mod_base = OTHER; note = 2'-O-methylguanosine-3'-phosphate
  modified_base 11: mod_base = OTHER; note = 2'-O-methylguanosine-3'-phosphate
  modified_base 12: mod_base = OTHER; note = 2'-O-methyladenosine-3'-phosphate
  modified_base 13: mod_base = OTHER; note = 2'-O-methylguanosine-3'-phosphate
  modified_base 14: mod_base = OTHER; note = 2'-fluorocytidine-3'-phosphate
  modified_base 15: mod_base = OTHER; note = 2'-O-methylcytidine-3'-phosphate
  modified_base 16: mod_base = OTHER; note = 2'-fluoroguanosine-3'-phosphate
  modified_base 17: mod_base = OTHER; note = 2'-O-methylcytidine-3'-phosphate
  modified_base 18: mod_base = OTHER; note = 2'-O-methyluridine-3'-phosphate
  modified_base 19: mod_base = OTHER; note = 2'-O-methyluridine-3'-phosphate
  modified_base 20: mod_base = OTHER; note = 2'-O-methyladenosine-3'-phosphate
  modified_base 21: mod_base = OTHER; note = 2'-O-methylcytidine-3'- phosphorothioate
  modified_base 22: mod_base = OTHER; note = 2'-O-methylguanosine-3'- phosphorothioate
  modified_base 23: mod_base = OTHER; note = 2'-O-methylcytidine-3'-phosphate
aatcgcggaggagccgcttacgc

SEQ ID NO: 494 - RNA, 23 nt, synthetic construct
  source 1..23: mol_type = other RNA; note = Description of Artificial Sequence: Synthetic oligonucleotide
  modified_base 1: mod_base = OTHER; note = 2'-O-methyladenosine-3'- phosphorothioate
  modified_base 2: mod_base = OTHER; note = 2'-fluoroadenosine-3'-phosphorothioate
  modified_base 3: mod_base = OTHER; note = 2'-O-methyluridine-3'-phosphate
  modified_base 4: mod_base = OTHER; note = 2'-O-methylcytidine-3'-phosphate
  modified_base 5: mod_base = OTHER; note = 2'-O-methylguanosine-3'-phosphate
  modified_base 6: mod_base = OTHER; note = 2'-fluoroguanosine-3'-phosphate
  modified_base 7: mod_base = OTHER; note = 2'-O-methylcytidine-3'-phosphate
  modified_base 8: mod_base = OTHER; note = 2'-fluoroadenosine-3'-phosphate
  modified_base 9: mod_base = OTHER; note = 2'-fluorouridine-3'-phosphate
  modified_base 10: mod_base = OTHER; note = 2'-O-methylcytidine-3'-phosphate
  modified_base 11: mod_base = OTHER; note = 2'-O-methylguanosine-3'-phosphate
  modified_base 12: mod_base = OTHER; note = 2'-O-methylcytidine-3'-phosphate
  modified_base 13: mod_base = OTHER; note = 2'-O-methylguanosine-3'-phosphate
  modified_base 14: mod_base = OTHER; note = 2'-fluoroguanosine-3'-phosphate
  modified_base 15: mod_base = OTHER; note = 2'-O-methyladenosine-3'-phosphate
  modified_base 16: mod_base = OTHER; note = 2'-fluoroguanosine-3'-phosphate
  modified_base 17: mod_base = OTHER; note = 2'-O-methylguanosine-3'-phosphate
  modified_base 18: mod_base = OTHER; note = 2'-O-methyladenosine-3'-phosphate
  modified_base 19: mod_base = OTHER; note = 2'-O-methylguanosine-3'-phosphate
  modified_base 20: mod_base = OTHER; note = 2'-O-methylcytidine-3'-phosphate
  modified_base 21: mod_base = OTHER; note = 2'-O-methylcytidine-3'- phosphorothioate
  modified_base 22: mod_base = OTHER; note = 2'-O-methylguanosine-3'- phosphorothioate
  modified_base 23: mod_base = OTHER; note = 2'-O-methylcytidine-3'-phosphate
aatcggcatcgcggaggagccgc

SEQ ID NO: 495 - RNA, 23 nt, synthetic construct
  source 1..23: mol_type = other RNA; note = Description of Artificial Sequence: Synthetic oligonucleotide
  modified_base 1: mod_base = OTHER; note = 2'-O-methyladenosine-3'- phosphorothioate
  modified_base 2: mod_base = OTHER; note = 2'-fluoroadenosine-3'-phosphorothioate
  modified_base 3: mod_base = OTHER; note = 2'-O-methylguanosine-3'-phosphate
  modified_base 4: mod_base = OTHER; note = 2'-O-methylguanosine-3'-phosphate
  modified_base 5: mod_base = OTHER; note = 2'-O-methyluridine-3'-phosphate
  modified_base 6: mod_base = OTHER; note = 2'-fluorocytidine-3'-phosphate
  modified_base 7: mod_base = OTHER; note = 2'-O-methyladenosine-3'-phosphate
  modified_base 8: mod_base = OTHER; note = 2'-fluorouridine-3'-phosphate
  modified_base 9: mod_base = OTHER; note = 2'-fluorocytidine-3'-phosphate
  modified_base 10: mod_base = OTHER; note = 2'-O-methylguanosine-3'-phosphate
  modified_base 11: mod_base = OTHER; note = 2'-O-methylguanosine-3'-phosphate
  modified_base 12: mod_base = OTHER; note = 2'-O-methylcytidine-3'-phosphate
  modified_base 13: mod_base = OTHER; note = 2'-O-methyladenosine-3'-phosphate
  modified_base 14: mod_base = OTHER; note = 2'-fluorouridine-3'-phosphate
  modified_base 15: mod_base = OTHER; note = 2'-O-methylcytidine-3'-phosphate
  modified_base 16: mod_base = OTHER; note = 2'-fluoroguanosine-3'-phosphate
  modified_base 17: mod_base = OTHER; note = 2'-O-methylcytidine-3'-phosphate
  modified_base 18: mod_base = OTHER; note = 2'-O-methylguanosine-3'-phosphate
  modified_base 19: mod_base = OTHER; note = 2'-O-methylguanosine-3'-phosphate
  modified_base 20: mod_base = OTHER; note = 2'-O-methyladenosine-3'-phosphate
  modified_base 21: mod_base = OTHER; note = 2'-O-methylguanosine-3'- phosphorothioate
  modified_base 22: mod_base = OTHER; note = 2'-O-methylguanosine-3'- phosphorothioate
  modified_base 23: mod_base = OTHER; note = 2'-O-methyladenosine-3'-phosphate
aaggtcatcggcatcgcggagga

SEQ ID NO: 496 - RNA, 23 nt, synthetic construct
  source 1..23: mol_type = other RNA; note = Description of Artificial Sequence: Synthetic oligonucleotide
  modified_base 1: mod_base = OTHER; note = 2'-O-methyladenosine-3'- phosphorothioate
  modified_base 2: mod_base = OTHER; note = 2'-fluorouridine -3'-phosphorothioate
  modified_base 3: mod_base = OTHER; note = 2'-O-methyluridine-3'-phosphate
  modified_base 4: mod_base = OTHER; note = 2'-O-methylcytidine-3'-phosphate
  modified_base 5: mod_base = OTHER; note = 2'-O-methyluridine-3'-phosphate
  modified_base 6: mod_base = OTHER; note = 2'-fluoroguanosine-3'-phosphate
  modified_base 7: mod_base = OTHER; note = 2'-O-methylcytidine-3'-phosphate
  modified_base 8: mod_base = OTHER; note = 2'-fluoroadenosine-3'-phosphate
  modified_base 9: mod_base = OTHER; note = 2'-fluoroguanosine-3'-phosphate
  modified_base 10: mod_base = OTHER; note = 2'-O-methylguanosine-3'-phosphate
  modified_base 11: mod_base = OTHER; note = 2'-O-methyluridine-3'-phosphate
  modified_base 12: mod_base = OTHER; note = 2'-O-methylcytidine-3'-phosphate
  modified_base 13: mod_base = OTHER; note = 2'-O-methyladenosine-3'-phosphate
  modified_base 14: mod_base = OTHER; note = 2'-fluorouridine-3'-phosphate
  modified_base 15: mod_base = OTHER; note = 2'-O-methylcytidine-3'-phosphate
  modified_base 16: mod_base = OTHER; note = 2'-fluoroguanosine-3'-phosphate
  modified_base 17: mod_base = OTHER; note = 2'-O-methylguanosine-3'-phosphate
  modified_base 18: mod_base = OTHER; note = 2'-O-methylcytidine-3'-phosphate
  modified_base 19: mod_base = OTHER; note = 2'-O-methyladenosine-3'-phosphate
  modified_base 20: mod_base = OTHER; note = 2'-O-methyluridine-3'-phosphate
  modified_base 21: mod_base = OTHER; note = 2'-O-methylcytidine-3'- phosphorothioate
  modified_base 22: mod_base = OTHER; note = 2'-O-methylguanosine-3'- phosphorothioate
  modified_base 23: mod_base = OTHER; note = 2'-O-methylcytidine-3'-phosphate
attctgcaggtcatcggcatcgc

SEQ ID NO: 497 - RNA, 23 nt, synthetic construct
  source 1..23: mol_type = other RNA; note = Description of Artificial Sequence: Synthetic oligonucleotide
  modified_base 1: mod_base = OTHER; note = 2'-O-methyladenosine-3'- phosphorothioate
  modified_base 2: mod_base = OTHER; note = 2'-fluoroadenosine-3'-phosphorothioate
  modified_base 3: mod_base = OTHER; note = 2'-O-methylguanosine-3'-phosphate
  modified_base 4: mod_base = OTHER; note = 2'-O-methylguanosine-3'-phosphate
  modified_base 5: mod_base = OTHER; note = 2'-O-methylcytidine-3'-phosphate
  modified_base 6: mod_base = OTHER; note = 2'-fluoroguanosine-3'-phosphate
  modified_base 7: mod_base = OTHER; note = 2'-O-methylcytidine-3'-phosphate
  modified_base 8: mod_base = OTHER; note = 2'-fluorouridine-3'-phosphate
  modified_base 9: mod_base = OTHER; note = 2'-fluorouridine-3'-phosphate
  modified_base 10: mod_base = OTHER; note = 2'-O-methylcytidine-3'-phosphate
  modified_base 11: mod_base = OTHER; note = 2'-O-methyluridine-3'-phosphate
  modified_base 12: mod_base = OTHER; note = 2'-O-methylguanosine-3'-phosphate
  modified_base 13: mod_base = OTHER; note = 2'-O-methylcytidine-3'-phosphate
  modified_base 14: mod_base = OTHER; note = 2'-fluoroadenosine-3'-phosphate
  modified_base 15: mod_base = OTHER; note = 2'-O-methylguanosine-3'-phosphate
  modified_base 16: mod_base = OTHER; note = 2'-fluoroguanosine-3'-phosphate
  modified_base 17: mod_base = OTHER; note = 2'-O-methyluridine-3'-phosphate
  modified_base 18: mod_base = OTHER; note = 2'-O-methylcytidine-3'-phosphate
  modified_base 19: mod_base = OTHER; note = 2'-O-methyladenosine-3'-phosphate
  modified_base 20: mod_base = OTHER; note = 2'-O-methyluridine-3'-phosphate
  modified_base 21: mod_base = OTHER; note = 2'-O-methylcytidine-3'- phosphorothioate
  modified_base 22: mod_base = OTHER; note = 2'-O-methylguanosine-3'- phosphorothioate
  modified_base 23: mod_base = OTHER; note = 2'-O-methylguanosine-3'-phosphate
aaggcgcttctgcaggtcatcgg

SEQ ID NO: 498 - RNA, 23 nt, synthetic construct
  source 1..23: mol_type = other RNA; note = Description of Artificial Sequence: Synthetic oligonucleotide
  modified_base 1: mod_base = OTHER; note = 2'-O-methyladenosine-3'- phosphorothioate
  modified_base 2: mod_base = OTHER; note = 2'-fluoroadenosine-3'-phosphorothioate
  modified_base 3: mod_base = OTHER; note = 2'-O-methylcytidine-3'-phosphate
  modified_base 4: mod_base = OTHER; note = 2'-O-methyluridine-3'-phosphate
  modified_base 5: mod_base = OTHER; note = 2'-O-methylguanosine-3'-phosphate
  modified_base 6: mod_base = OTHER; note = 2'-fluorocytidine-3'-phosphate
  modified_base 7: mod_base = OTHER; note = 2'-O-methylcytidine-3'-phosphate
  modified_base 8: mod_base = OTHER; note = 2'-fluoroadenosine-3'-phosphate
  modified_base 9: mod_base = OTHER; note = 2'-fluoroguanosine-3'-phosphate
  modified_base 10: mod_base = OTHER; note = 2'-O-methylguanosine-3'-phosphate
  modified_base 11: mod_base = OTHER; note = 2'-O-methylcytidine-3'-phosphate
  modified_base 12: mod_base = OTHER; note = 2'-O-methylguanosine-3'-phosphate
  modified_base 13: mod_base = OTHER; note = 2'-O-methylcytidine-3'-phosphate
  modified_base 14: mod_base = OTHER; note = 2'-fluorouridine-3'-phosphate
  modified_base 15: mod_base = OTHER; note = 2'-O-methyluridine-3'-phosphate
  modified_base 16: mod_base = OTHER; note = 2'-fluorocytidine-3'-phosphate
  modified_base 17: mod_base = OTHER; note = 2'-O-methyluridine-3'-phosphate
  modified_base 18: mod_base = OTHER; note = 2'-O-methylguanosine-3'-phosphate
  modified_base 19: mod_base = OTHER; note = 2'-O-methylcytidine-3'-phosphate
  modified_base 20: mod_base = OTHER; note = 2'-O-methyladenosine-3'-phosphate
  modified_base 21: mod_base = OTHER; note = 2'-O-methylguanosine-3'- phosphorothioate
  modified_base 22: mod_base = OTHER; note = 2'-O-methylguanosine-3'- phosphorothioate
  modified_base 23: mod_base = OTHER; note = 2'-O-methyluridine-3'-phosphate
aactgccaggcgcttctgcaggt

SEQ ID NO: 499 - RNA, 23 nt, synthetic construct
  source 1..23: mol_type = other RNA; note = Description of Artificial Sequence: Synthetic oligonucleotide
  modified_base 1: mod_base = OTHER; note = 2'-O-methyladenosine-3'- phosphorothioate
  modified_base 2: mod_base = OTHER; note = 2'-fluorouridine -3'-phosphorothioate
  modified_base 3: mod_base = OTHER; note = 2'-O-methylguanosine-3'-phosphate
  modified_base 4: mod_base = OTHER; note = 2'-O-methylguanosine-3'-phosphate
  modified_base 5: mod_base = OTHER; note = 2'-O-methyluridine-3'-phosphate
  modified_base 6: mod_base = OTHER; note = 2'-fluoroadenosine-3'-phosphate
  modified_base 7: mod_base = OTHER; note = 2'-O-methylcytidine-3'-phosphate
  modified_base 8: mod_base = OTHER; note = 2'-fluoroadenosine-3'-phosphate
  modified_base 9: mod_base = OTHER; note = 2'-fluorocytidine-3'-phosphate
  modified_base 10: mod_base = OTHER; note = 2'-O-methyluridine-3'-phosphate
  modified_base 11: mod_base = OTHER; note = 2'-O-methylguanosine-3'-phosphate
  modified_base 12: mod_base = OTHER; note = 2'-O-methylcytidine-3'-phosphate
  modified_base 13: mod_base = OTHER; note = 2'-O-methylcytidine-3'-phosphate
  modified_base 14: mod_base = OTHER; note = 2'-fluoroadenosine-3'-phosphate
  modified_base 15: mod_base = OTHER; note = 2'-O-methylguanosine-3'-phosphate
  modified_base 16: mod_base = OTHER; note = 2'-fluoroguanosine-3'-phosphate
  modified_base 17: mod_base = OTHER; note = 2'-O-methylcytidine-3'-phosphate
  modified_base 18: mod_base = OTHER; note = 2'-O-methylguanosine-3'-phosphate
  modified_base 19: mod_base = OTHER; note = 2'-O-methylcytidine-3'-phosphate
  modified_base 20: mod_base = OTHER; note = 2'-O-methyluridine-3'-phosphate
  modified_base 21: mod_base = OTHER; note = 2'-O-methyluridine-3'-phosphorothioate
  modified_base 22: mod_base = OTHER; note = 2'-O-methylcytidine-3'- phosphorothioate
  modified_base 23: mod_base = OTHER; note = 2'-O-methyluridine-3'-phosphate
atggtacactgccaggcgcttct

SEQ ID NO: 500 - RNA, 23 nt, synthetic construct
  source 1..23: mol_type = other RNA; note = Description of Artificial Sequence: Synthetic oligonucleotide
  modified_base 1: mod_base = OTHER; note = 2'-O-methyladenosine-3'- phosphorothioate
  modified_base 2: mod_base = OTHER; note = 2'-fluorocytidine-3'-phosphorothioate
  modified_base 3: mod_base = OTHER; note = 2'-O-methylcytidine-3'-phosphate
  modified_base 4: mod_base = OTHER; note = 2'-O-methylguanosine-3'-phosphate
  modified_base 5: mod_base = OTHER; note = 2'-O-methylguanosine-3'-phosphate
  modified_base 6: mod_base = OTHER; note = 2'-fluorocytidine-3'-phosphate
  modified_base 7: mod_base = OTHER; note = 2'-O-methylcytidine-3'-phosphate
  modified_base 8: mod_base = OTHER; note = 2'-fluorouridine-3'-phosphate
  modified_base 9: mod_base = OTHER; note = 2'-fluoroguanosine-3'-phosphate
  modified_base 10: mod_base = OTHER; note = 2'-O-methylguanosine-3'-phosphate
  modified_base 11: mod_base = OTHER; note = 2'-O-methyluridine-3'-phosphate
  modified_base 12: mod_base = OTHER; note = 2'-O-methyladenosine-3'-phosphate
  modified_base 13: mod_base = OTHER; note = 2'-O-methylcytidine-3'-phosphate
  modified_base 14: mod_base = OTHER; note = 2'-fluoroadenosine-3'-phosphate
  modified_base 15: mod_base = OTHER; note = 2'-O-methylcytidine-3'-phosphate
  modified_base 16: mod_base = OTHER; note = 2'-fluorouridine-3'-phosphate
  modified_base 17: mod_base = OTHER; note = 2'-O-methylguanosine-3'-phosphate
  modified_base 18: mod_base = OTHER; note = 2'-O-methylcytidine-3'-phosphate
  modified_base 19: mod_base = OTHER; note = 2'-O-methylcytidine-3'-phosphate
  modified_base 20: mod_base = OTHER; note = 2'-O-methyladenosine-3'-phosphate
  modified_base 21: mod_base = OTHER; note = 2'-O-methylguanosine-3'- phosphorothioate
  modified_base 22: mod_base = OTHER; note = 2'-O-methylguanosine-3'- phosphorothioate
  modified_base 23: mod_base = OTHER; note = 2'-O-methylcytidine-3'-phosphate
accggcctggtacactgccaggc

SEQ ID NO: 501 - RNA, 23 nt, synthetic construct
  source 1..23: mol_type = other RNA; note = Description of Artificial Sequence: Synthetic oligonucleotide
  modified_base 1: mod_base = OTHER; note = 2'-O-methyladenosine-3'- phosphorothioate
  modified_base 2: mod_base = OTHER; note = 2'-fluoroadenosine-3'-phosphorothioate
  modified_base 3: mod_base = OTHER; note = 2'-O-methyluridine-3'-phosphate
  modified_base 4: mod_base = OTHER; note = 2'-O-methylguanosine-3'-phosphate
  modified_base 5: mod_base = OTHER; note = 2'-O-methylguanosine-3'-phosphate
  modified_base 6: mod_base = OTHER; note = 2'-fluorocytidine-3'-phosphate
  modified_base 7: mod_base = OTHER; note = 2'-O-methylguanosine-3'-phosphate
  modified_base 8: mod_base = OTHER; note = 2'-fluorocytidine-3'-phosphate
  modified_base 9: mod_base = OTHER; note = 2'-fluorouridine-3'-phosphate
  modified_base 10: mod_base = OTHER; note = 2'-O-methylguanosine-3'-phosphate
  modified_base 11: mod_base = OTHER; note = 2'-O-methyladenosine-3'-phosphate
  modified_base 12: mod_base = OTHER; note = 2'-O-methylguanosine-3'-phosphate
  modified_base 13: mod_base = OTHER; note = 2'-O-methylguanosine-3'-phosphate
  modified_base 14: mod_base = OTHER; note = 2'-fluorocytidine-3'-phosphate
  modified_base 15: mod_base = OTHER; note = 2'-O-methylcytidine-3'-phosphate
  modified_base 16: mod_base = OTHER; note = 2'-fluoroguanosine-3'-phosphate
  modified_base 17: mod_base = OTHER; note = 2'-O-methylcytidine-3'-phosphate
  modified_base 18: mod_base = OTHER; note = 2'-O-methylguanosine-3'-phosphate
  modified_base 19: mod_base = OTHER; note = 2'-O-methylcytidine-3'-phosphate
  modified_base 20: mod_base = OTHER; note = 2'-O-methyluridine-3'-phosphate
  modified_base 21: mod_base = OTHER; note = 2'-O-methylcytidine-3'- phosphorothioate
  modified_base 22: mod_base = OTHER; note = 2'-O-methylguanosine-3'- phosphorothioate
  modified_base 23: mod_base = OTHER; note = 2'-O-methylguanosine-3'-phosphate
aatggcgctgaggccgcgctcgg

SEQ ID NO: 502 - RNA, 23 nt, synthetic construct
  source 1..23: mol_type = other RNA; note = Description of Artificial Sequence: Synthetic oligonucleotide
  modified_base 1: mod_base = OTHER; note = 2'-O-methyladenosine-3'- phosphorothioate
  modified_base 2: mod_base = OTHER; note = 2'-fluorocytidine-3'-phosphorothioate
  modified_base 3: mod_base = OTHER; note = 2'-O-methylguanosine-3'-phosphate
  modified_base 4: mod_base = OTHER; note = 2'-O-methylcytidine-3'-phosphate
  modified_base 5: mod_base = OTHER; note = 2'-O-methylguanosine-3'-phosphate
  modified_base 6: mod_base = OTHER; note = 2'-fluoroguanosine-3'-phosphate
  modified_base 7: mod_base = OTHER; note = 2'-O-methyladenosine-3'-phosphate
  modified_base 8: mod_base = OTHER; note = 2'-fluorouridine-3'-phosphate
  modified_base 9: mod_base = OTHER; note = 2'-fluoroguanosine-3'-phosphate
  modified_base 10: mod_base = OTHER; note = 2'-O-methylguanosine-3'-phosphate
  modified_base 11: mod_base = OTHER; note = 2'-O-methylcytidine-3'-phosphate
  modified_base 12: mod_base = OTHER; note = 2'-O-methylguanosine-3'-phosphate
  modified_base 13: mod_base = OTHER; note = 2'-O-methylcytidine-3'-phosphate
  modified_base 14: mod_base = OTHER; note = 2'-fluorouridine-3'-phosphate
  modified_base 15: mod_base = OTHER; note = 2'-O-methylguanosine-3'-phosphate
  modified_base 16: mod_base = OTHER; note = 2'-fluoroadenosine-3'-phosphate
  modified_base 17: mod_base = OTHER; note = 2'-O-methylguanosine-3'-phosphate
  modified_base 18: mod_base = OTHER; note = 2'-O-methylguanosine-3'-phosphate
  modified_base 19: mod_base = OTHER; note = 2'-O-methylcytidine-3'-phosphate
  modified_base 20: mod_base = OTHER; note = 2'-O-methylcytidine-3'-phosphate
  modified_base 21: mod_base = OTHER; note = 2'-O-methylguanosine-3'- phosphorothioate
  modified_base 22: mod_base = OTHER; note = 2'-O-methylcytidine-3'- phosphorothioate
  modified_base 23: mod_base = OTHER; note = 2'-O-methylguanosine-3'-phosphate
acgcggatggcgctgaggccgcg

SEQ ID NO: 503 - RNA, 23 nt, synthetic construct
  source 1..23: mol_type = other RNA; note = Description of Artificial Sequence: Synthetic oligonucleotide
  modified_base 1: mod_base = OTHER; note = 2'-O-methyladenosine-3'- phosphorothioate
  modified_base 2: mod_base = OTHER; note = 2'-fluoroadenosine-3'-phosphorothioate
  modified_base 3: mod_base = OTHER; note = 2'-O-methylguanosine-3'-phosphate
  modified_base 4: mod_base = OTHER; note = 2'-O-methylguanosine-3'-phosphate
  modified_base 5: mod_base = OTHER; note = 2'-O-methylcytidine-3'-phosphate
  modified_base 6: mod_base = OTHER; note = 2'-fluoroguanosine-3'-phosphate
  modified_base 7: mod_base = OTHER; note = 2'-O-methylcytidine-3'-phosphate
  modified_base 8: mod_base = OTHER; note = 2'-fluorouridine-3'-phosphate
  modified_base 9: mod_base = OTHER; note = 2'-fluorocytidine-3'-phosphate
  modified_base 10: mod_base = OTHER; note = 2'-O-methylguanosine-3'-phosphate
  modified_base 11: mod_base = OTHER; note = 2'-O-methylcytidine-3'-phosphate
  modified_base 12: mod_base = OTHER; note = 2'-O-methylguanosine-3'-phosphate
  modified_base 13: mod_base = OTHER; note = 2'-O-methylguanosine-3'-phosphate
  modified_base 14: mod_base = OTHER; note = 2'-fluoroadenosine-3'-phosphate
  modified_base 15: mod_base = OTHER; note = 2'-O-methyluridine-3'-phosphate
  modified_base 16: mod_base = OTHER; note = 2'-fluoroguanosine-3'-phosphate
  modified_base 17: mod_base = OTHER; note = 2'-O-methylguanosine-3'-phosphate
  modified_base 18: mod_base = OTHER; note = 2'-O-methylcytidine-3'-phosphate
  modified_base 19: mod_base = OTHER; note = 2'-O-methylguanosine-3'-phosphate
  modified_base 20: mod_base = OTHER; note = 2'-O-methylcytidine-3'-phosphate
  modified_base 21: mod_base = OTHER; note = 2'-O-methyluridine-3'-phosphorothioate
  modified_base 22: mod_base = OTHER; note = 2'-O-methylguanosine-3'- phosphorothioate
  modified_base 23: mod_base = OTHER; note = 2'-O-methyladenosine-3'-phosphate
aaggcgctcgcggatggcgctga

SEQ ID NO: 504 - RNA, 23 nt, synthetic construct
  source 1..23: mol_type = other RNA; note = Description of Artificial Sequence: Synthetic oligonucleotide
  modified_base 1: mod_base = OTHER; note = 2'-O-methyladenosine-3'- phosphorothioate
  modified_base 2: mod_base = OTHER; note = 2'-fluorocytidine-3'-phosphorothioate
  modified_base 3: mod_base = OTHER; note = 2'-O-methyluridine-3'-phosphate
  modified_base 4: mod_base = OTHER; note = 2'-O-methylguanosine-3'-phosphate
  modified_base 5: mod_base = OTHER; note = 2'-O-methyluridine-3'-phosphate
  modified_base 6: mod_base = OTHER; note = 2'-fluorouridine-3'-phosphate
  modified_base 7: mod_base = OTHER; note = 2'-O-methylcytidine-3'-phosphate
  modified_base 8: mod_base = OTHER; note = 2'-fluorocytidine-3'-phosphate
  modified_base 9: mod_base = OTHER; note = 2'-fluoroadenosine-3'-phosphate
  modified_base 10: mod_base = OTHER; note = 2'-O-methylcytidine-3'-phosphate
  modified_base 11: mod_base = OTHER; note = 2'-O-methylcytidine-3'-phosphate
  modified_base 12: mod_base = OTHER; note = 2'-O-methyladenosine-3'-phosphate
  modified_base 13: mod_base = OTHER; note = 2'-O-methylguanosine-3'-phosphate
  modified_base 14: mod_base = OTHER; note = 2'-fluoroguanosine-3'-phosphate
  modified_base 15: mod_base = OTHER; note = 2'-O-methylguanosine-3'-phosphate
  modified_base 16: mod_base = OTHER; note = 2'-fluoroguanosine-3'-phosphate
  modified_base 17: mod_base = OTHER; note = 2'-O-methylcytidine-3'-phosphate
  modified_base 18: mod_base = OTHER; note = 2'-O-methylcytidine-3'-phosphate
  modified_base 19: mod_base = OTHER; note = 2'-O-methylcytidine-3'-phosphate
  modified_base 20: mod_base = OTHER; note = 2'-O-methylcytidine-3'-phosphate
  modified_base 21: mod_base = OTHER; note = 2'-O-methyladenosine-3'- phosphorothioate
  modified_base 22: mod_base = OTHER; note = 2'-O-methylguanosine-3'- phosphorothioate
  modified_base 23: mod_base = OTHER; note = 2'-O-methylguanosine-3'-phosphate
actgttccaccaggggccccagg

SEQ ID NO: 505 - RNA, 23 nt, synthetic construct
  source 1..23: mol_type = other RNA; note = Description of Artificial Sequence: Synthetic oligonucleotide
  modified_base 1: mod_base = OTHER; note = 2'-O-methyladenosine-3'- phosphorothioate
  modified_base 2: mod_base = OTHER; note = 2'-fluorocytidine-3'-phosphorothioate
  modified_base 3: mod_base = OTHER; note = 2'-O-methylguanosine-3'-phosphate
  modified_base 4: mod_base = OTHER; note = 2'-O-methylguanosine-3'-phosphate
  modified_base 5: mod_base = OTHER; note = 2'-O-methylcytidine-3'-phosphate
  modified_base 6: mod_base = OTHER; note = 2'-fluorocytidine-3'-phosphate
  modified_base 7: mod_base = OTHER; note = 2'-O-methylcytidine-3'-phosphate
  modified_base 8: mod_base = OTHER; note = 2'-fluorouridine-3'-phosphate
  modified_base 9: mod_base = OTHER; note = 2'-fluoroguanosine-3'-phosphate
  modified_base 10: mod_base = OTHER; note = 2'-O-methyluridine-3'-phosphate
  modified_base 11: mod_base = OTHER; note = 2'-O-methyluridine-3'-phosphate
  modified_base 12: mod_base = OTHER; note = 2'-O-methylcytidine-3'-phosphate
  modified_base 13: mod_base = OTHER; note = 2'-O-methylcytidine-3'-phosphate
  modified_base 14: mod_base = OTHER; note = 2'-fluoroadenosine-3'-phosphate
  modified_base 15: mod_base = OTHER; note = 2'-O-methylcytidine-3'-phosphate
  modified_base 16: mod_base = OTHER; note = 2'-fluorocytidine-3'-phosphate
  modified_base 17: mod_base = OTHER; note = 2'-O-methyladenosine-3'-phosphate
  modified_base 18: mod_base = OTHER; note = 2'-O-methylguanosine-3'-phosphate
  modified_base 19: mod_base = OTHER; note = 2'-O-methylguanosine-3'-phosphate
  modified_base 20: mod_base = OTHER; note = 2'-O-methylguanosine-3'-phosphate
  modified_base 21: mod_base = OTHER; note = 2'-O-methylguanosine-3'- phosphorothioate
  modified_base 22: mod_base = OTHER; note = 2'-O-methylcytidine-3'- phosphorothioate
  modified_base 23: mod_base = OTHER; note = 2'-O-methylcytidine-3'-phosphate
acggccctgttccaccaggggcc

SEQ ID NO: 506 - RNA, 23 nt, synthetic construct
  source 1..23: mol_type = other RNA; note = Description of Artificial Sequence: Synthetic oligonucleotide
  modified_base 1: mod_base = OTHER; note = 2'-O-methyladenosine-3'- phosphorothioate
  modified_base 2: mod_base = OTHER; note = 2'-fluoroadenosine-3'-phosphorothioate
  modified_base 3: mod_base = OTHER; note = 2'-O-methylcytidine-3'-phosphate
  modified_base 4: mod_base = OTHER; note = 2'-O-methyladenosine-3'-phosphate
  modified_base 5: mod_base = OTHER; note = 2'-O-methylguanosine-3'-phosphate
  modified_base 6: mod_base = OTHER; note = 2'-fluorouridine-3'-phosphate
  modified_base 7: mod_base = OTHER; note = 2'-O-methylguanosine-3'-phosphate
  modified_base 8: mod_base = OTHER; note = 2'-fluoroguanosine-3'-phosphate
  modified_base 9: mod_base = OTHER; note = 2'-fluorocytidine-3'-phosphate
  modified_base 10: mod_base = OTHER; note = 2'-O-methylguanosine-3'-phosphate
  modified_base 11: mod_base = OTHER; note = 2'-O-methylguanosine-3'-phosphate
  modified_base 12: mod_base = OTHER; note = 2'-O-methylcytidine-3'-phosphate
  modified_base 13: mod_base = OTHER; note = 2'-O-methylcytidine-3'-phosphate
  modified_base 14: mod_base = OTHER; note = 2'-fluorocytidine-3'-phosphate
  modified_base 15: mod_base = OTHER; note = 2'-O-methylguanosine-3'-phosphate
  modified_base 16: mod_base = OTHER; note = 2'-fluorocytidine-3'-phosphate
  modified_base 17: mod_base = OTHER; note = 2'-O-methyladenosine-3'-phosphate
  modified_base 18: mod_base = OTHER; note = 2'-O-methylcytidine-3'-phosphate
  modified_base 19: mod_base = OTHER; note = 2'-O-methylguanosine-3'-phosphate
  modified_base 20: mod_base = OTHER; note = 2'-O-methylcytidine-3'-phosphate
  modified_base 21: mod_base = OTHER; note = 2'-O-methylguanosine-3'- phosphorothioate
  modified_base 22: mod_base = OTHER; note = 2'-O-methylguanosine-3'- phosphorothioate
  modified_base 23: mod_base = OTHER; note = 2'-O-methylcytidine-3'-phosphate
aacagtggcggcccgcacgcggc

SEQ ID NO: 507 - RNA, 23 nt, synthetic construct
  source 1..23: mol_type = other RNA; note = Description of Artificial Sequence: Synthetic oligonucleotide
  modified_base 1: mod_base = OTHER; note = 2'-O-methyladenosine-3'- phosphorothioate
  modified_base 2: mod_base = OTHER; note = 2'-fluoroadenosine-3'-phosphorothioate
  modified_base 3: mod_base = OTHER; note = 2'-O-methylguanosine-3'-phosphate
  modified_base 4: mod_base = OTHER; note = 2'-O-methylguanosine-3'-phosphate
  modified_base 5: mod_base = OTHER; note = 2'-O-methylguanosine-3'-phosphate
  modified_base 6: mod_base = OTHER; note = 2'-fluoroadenosine-3'-phosphate
  modified_base 7: mod_base = OTHER; note = 2'-O-methylguanosine-3'-phosphate
  modified_base 8: mod_base = OTHER; note = 2'-fluorocytidine-3'-phosphate
  modified_base 9: mod_base = OTHER; note = 2'-fluorocytidine-3'-phosphate
  modified_base 10: mod_base = OTHER; note = 2'-O-methylcytidine-3'-phosphate
  modified_base 11: mod_base = OTHER; note = 2'-O-methyladenosine-3'-phosphate
  modified_base 12: mod_base = OTHER; note = 2'-O-methylcytidine-3'-phosphate
  modified_base 13: mod_base = OTHER; note = 2'-O-methyladenosine-3'-phosphate
  modified_base 14: mod_base = OTHER; note = 2'-fluoroguanosine-3'-phosphate
  modified_base 15: mod_base = OTHER; note = 2'-O-methyluridine-3'-phosphate
  modified_base 16: mod_base = OTHER; note = 2'-fluoroguanosine-3'-phosphate
  modified_base 17: mod_base = OTHER; note = 2'-O-methylguanosine-3'-phosphate
  modified_base 18: mod_base = OTHER; note = 2'-O-methylcytidine-3'-phosphate
  modified_base 19: mod_base = OTHER; note = 2'-O-methylguanosine-3'-phosphate
  modified_base 20: mod_base = OTHER; note = 2'-O-methylguanosine-3'-phosphate
  modified_base 21: mod_base = OTHER; note = 2'-O-methylcytidine-3'- phosphorothioate
  modified_base 22: mod_base = OTHER; note = 2'-O-methylcytidine-3'- phosphorothioate
  modified_base 23: mod_base = OTHER; note = 2'-O-methylcytidine-3'-phosphate
aagggagcccacagtggcggccc

SEQ ID NO: 508 - RNA, 23 nt, synthetic construct
  source 1..23: mol_type = other RNA; note = Description of Artificial Sequence: Synthetic oligonucleotide
  modified_base 1: mod_base = OTHER; note = 2'-O-methyladenosine-3'- phosphorothioate
  modified_base 2: mod_base = OTHER; note = 2'-fluoroguanosine-3'-phosphorothioate
  modified_base 3: mod_base = OTHER; note = 2'-O-methyluridine-3'-phosphate
  modified_base 4: mod_base = OTHER; note = 2'-O-methyladenosine-3'-phosphate
  modified_base 5: mod_base = OTHER; note = 2'-O-methylguanosine-3'-phosphate
  modified_base 6: mod_base = OTHER; note = 2'-fluorocytidine-3'-phosphate
  modified_base 7: mod_base = OTHER; note = 2'-O-methylguanosine-3'-phosphate
  modified_base 8: mod_base = OTHER; note = 2'-fluoroguanosine-3'-phosphate
  modified_base 9: mod_base = OTHER; note = 2'-fluorocytidine-3'-phosphate
  modified_base 10: mod_base = OTHER; note = 2'-O-methyluridine-3'-phosphate
  modified_base 11: mod_base = OTHER; note = 2'-O-methylguanosine-3'-phosphate
  modified_base 12: mod_base = OTHER; note = 2'-O-methylguanosine-3'-phosphate
  modified_base 13: mod_base = OTHER; note = 2'-O-methylcytidine-3'-phosphate
  modified_base 14: mod_base = OTHER; note = 2'-fluorocytidine-3'-phosphate
  modified_base 15: mod_base = OTHER; note = 2'-O-methylguanosine-3'-phosphate
  modified_base 16: mod_base = OTHER; note = 2'-fluoroguanosine-3'-phosphate
  modified_base 17: mod_base = OTHER; note = 2'-O-methylcytidine-3'-phosphate
  modified_base 18: mod_base = OTHER; note = 2'-O-methylcytidine-3'-phosphate
  modified_base 19: mod_base = OTHER; note = 2'-O-methyladenosine-3'-phosphate
  modified_base 20: mod_base = OTHER; note = 2'-O-methylguanosine-3'-phosphate
  modified_base 21: mod_base = OTHER; note = 2'-O-methylguanosine-3'- phosphorothioate
  modified_base 22: mod_base = OTHER; note = 2'-O-methylguanosine-3'- phosphorothioate
  modified_base 23: mod_base = OTHER; note = 2'-O-methyladenosine-3'-phosphate
agtagcggctggccggccaggga

SEQ ID NO: 509 - RNA, 23 nt, synthetic construct
  source 1..23: mol_type = other RNA; note = Description of Artificial Sequence: Synthetic oligonucleotide
  modified_base 1: mod_base = OTHER; note = 2'-O-methyladenosine-3'- phosphorothioate
  modified_base 2: mod_base = OTHER; note = 2'-fluorocytidine-3'-phosphorothioate
  modified_base 3: mod_base = OTHER; note = 2'-O-methylguanosine-3'-phosphate
  modified_base 4: mod_base = OTHER; note = 2'-O-methylcytidine-3'-phosphate
  modified_base 5: mod_base = OTHER; note = 2'-O-methyluridine-3'-phosphate
  modified_base 6: mod_base = OTHER; note = 2'-fluorocytidine-3'-phosphate
  modified_base 7: mod_base = OTHER; note = 2'-O-methylcytidine-3'-phosphate
  modified_base 8: mod_base = OTHER; note = 2'-fluorouridine-3'-phosphate
  modified_base 9: mod_base = OTHER; note = 2'-fluoroguanosine-3'-phosphate
  modified_base 10: mod_base = OTHER; note = 2'-O-methyluridine-3'-phosphate
  modified_base 11: mod_base = OTHER; note = 2'-O-methyladenosine-3'-phosphate
  modified_base 12: mod_base = OTHER; note = 2'-O-methylguanosine-3'-phosphate
  modified_base 13: mod_base = OTHER; note = 2'-O-methylcytidine-3'-phosphate
  modified_base 14: mod_base = OTHER; note = 2'-fluoroguanosine-3'-phosphate
  modified_base 15: mod_base = OTHER; note = 2'-O-methylguanosine-3'-phosphate
  modified_base 16: mod_base = OTHER; note = 2'-fluorocytidine-3'-phosphate
  modified_base 17: mod_base = OTHER; note = 2'-O-methyluridine-3'-phosphate
  modified_base 18: mod_base = OTHER; note = 2'-O-methylguanosine-3'-phosphate
  modified_base 19: mod_base = OTHER; note = 2'-O-methylguanosine-3'-phosphate
  modified_base 20: mod_base = OTHER; note = 2'-O-methylcytidine-3'-phosphate
  modified_base 21: mod_base = OTHER; note = 2'-O-methylcytidine-3'- phosphorothioate
  modified_base 22: mod_base = OTHER; note = 2'-O-methylguanosine-3'- phosphorothioate
  modified_base 23: mod_base = OTHER; note = 2'-O-methylguanosine-3'-phosphate
acgctcctgtagcggctggccgg

SEQ ID NO: 510 - RNA, 23 nt, synthetic construct
  source 1..23: mol_type = other RNA; note = Description of Artificial Sequence: Synthetic oligonucleotide
  modified_base 1: mod_base = OTHER; note = 2'-O-methyladenosine-3'- phosphorothioate
  modified_base 2: mod_base = OTHER; note = 2'-fluoroguanosine-3'-phosphorothioate
  modified_base 3: mod_base = OTHER; note = 2'-O-methylguanosine-3'-phosphate
  modified_base 4: mod_base = OTHER; note = 2'-O-methylguanosine-3'-phosphate
  modified_base 5: mod_base = OTHER; note = 2'-O-methylcytidine-3'-phosphate
  modified_base 6: mod_base = OTHER; note = 2'-fluorocytidine-3'-phosphate
  modified_base 7: mod_base = OTHER; note = 2'-O-methylcytidine-3'-phosphate
  modified_base 8: mod_base = OTHER; note = 2'-fluoroguanosine-3'-phosphate
  modified_base 9: mod_base = OTHER; note = 2'-fluorocytidine-3'-phosphate
  modified_base 10: mod_base = OTHER; note = 2'-O-methyluridine-3'-phosphate
  modified_base 11: mod_base = OTHER; note = 2'-O-methylcytidine-3'-phosphate
  modified_base 12: mod_base = OTHER; note = 2'-O-methylcytidine-3'-phosphate
  modified_base 13: mod_base = OTHER; note = 2'-O-methyluridine-3'-phosphate
  modified_base 14: mod_base = OTHER; note = 2'-fluoroguanosine-3'-phosphate
  modified_base 15: mod_base = OTHER; note = 2'-O-methyluridine-3'-phosphate
  modified_base 16: mod_base = OTHER; note = 2'-fluoroadenosine-3'-phosphate
  modified_base 17: mod_base = OTHER; note = 2'-O-methylguanosine-3'-phosphate
  modified_base 18: mod_base = OTHER; note = 2'-O-methylcytidine-3'-phosphate
  modified_base 19: mod_base = OTHER; note = 2'-O-methylguanosine-3'-phosphate
  modified_base 20: mod_base = OTHER; note = 2'-O-methylguanosine-3'-phosphate
  modified_base 21: mod_base = OTHER; note = 2'-O-methylcytidine-3'- phosphorothioate
  modified_base 22: mod_base = OTHER; note = 2'-O-methyluridine-3'-phosphorothioate
  modified_base 23: mod_base = OTHER; note = 2'-O-methylguanosine-3'-phosphate
agggcccgctcctgtagcggctg

SEQ ID NO: 511 - RNA, 23 nt, synthetic construct
  source 1..23: mol_type = other RNA; note = Description of Artificial Sequence: Synthetic oligonucleotide
  modified_base 1: mod_base = OTHER; note = 2'-O-methyladenosine-3'- phosphorothioate
  modified_base 2: mod_base = OTHER; note = 2'-fluorocytidine-3'-phosphorothioate
  modified_base 3: mod_base = OTHER; note = 2'-O-methylcytidine-3'-phosphate
  modified_base 4: mod_base = OTHER; note = 2'-O-methylcytidine-3'-phosphate
  modified_base 5: mod_base = OTHER; note = 2'-O-methyladenosine-3'-phosphate
  modified_base 6: mod_base = OTHER; note = 2'-fluorouridine-3'-phosphate
  modified_base 7: mod_base = OTHER; note = 2'-O-methylcytidine-3'-phosphate
  modified_base 8: mod_base = OTHER; note = 2'-fluorouridine-3'-phosphate
  modified_base 9: mod_base = OTHER; note = 2'-fluorocytidine-3'-phosphate
  modified_base 10: mod_base = OTHER; note = 2'-O-methylcytidine-3'-phosphate
  modified_base 11: mod_base = OTHER; note = 2'-O-methyluridine-3'-phosphate
  modified_base 12: mod_base = OTHER; note = 2'-O-methylcytidine-3'-phosphate
  modified_base 13: mod_base = OTHER; note = 2'-O-methylcytidine-3'-phosphate
  modified_base 14: mod_base = OTHER; note = 2'-fluoroadenosine-3'-phosphate
  modified_base 15: mod_base = OTHER; note = 2'-O-methyluridine-3'-phosphate
  modified_base 16: mod_base = OTHER; note = 2'-fluorocytidine-3'-phosphate
  modified_base 17: mod_base = OTHER; note = 2'-O-methylcytidine-3'-phosphate
  modified_base 18: mod_base = OTHER; note = 2'-O-methylguanosine-3'-phosphate
  modified_base 19: mod_base = OTHER; note = 2'-O-methylcytidine-3'-phosphate
  modified_base 20: mod_base = OTHER; note = 2'-O-methylguanosine-3'-phosphate
  modified_base 21: mod_base = OTHER; note = 2'-O-methylcytidine-3'- phosphorothioate
  modified_base 22: mod_base = OTHER; note = 2'-O-methylguanosine-3'- phosphorothioate
  modified_base 23: mod_base = OTHER; note = 2'-O-methylcytidine-3'-phosphate
acccatctcctccatccgcgcgc

SEQ ID NO: 512 - RNA, 23 nt, synthetic construct
  source 1..23: mol_type = other RNA; note = Description of Artificial Sequence: Synthetic oligonucleotide
  modified_base 1: mod_base = OTHER; note = 2'-O-methyladenosine-3'- phosphorothioate
  modified_base 2: mod_base = OTHER; note = 2'-fluoroadenosine-3'-phosphorothioate
  modified_base 3: mod_base = OTHER; note = 2'-O-methylcytidine-3'-phosphate
  modified_base 4: mod_base = OTHER; note = 2'-O-methylcytidine-3'-phosphate
  modified_base 5: mod_base = OTHER; note = 2'-O-methyluridine-3'-phosphate
  modified_base 6: mod_base = OTHER; note = 2'-fluorocytidine-3'-phosphate
  modified_base 7: mod_base = OTHER; note = 2'-O-methylguanosine-3'-phosphate
  modified_base 8: mod_base = OTHER; note = 2'-fluorouridine-3'-phosphate
  modified_base 9: mod_base = OTHER; note = 2'-fluorocytidine-3'-phosphate
  modified_base 10: mod_base = OTHER; note = 2'-O-methylcytidine-3'-phosphate
  modified_base 11: mod_base = OTHER; note = 2'-O-methyladenosine-3'-phosphate
  modified_base 12: mod_base = OTHER; note = 2'-O-methylguanosine-3'-phosphate
  modified_base 13: mod_base = OTHER; note = 2'-O-methylguanosine-3'-phosphate
  modified_base 14: mod_base = OTHER; note = 2'-fluorocytidine-3'-phosphate
  modified_base 15: mod_base = OTHER; note = 2'-O-methylguanosine-3'-phosphate
  modified_base 16: mod_base = OTHER; note = 2'-fluoroguanosine-3'-phosphate
  modified_base 17: mod_base = OTHER; note = 2'-O-methyluridine-3'-phosphate
  modified_base 18: mod_base = OTHER; note = 2'-O-methylcytidine-3'-phosphate
  modified_base 19: mod_base = OTHER; note = 2'-O-methylguanosine-3'-phosphate
  modified_base 20: mod_base = OTHER; note = 2'-O-methylcytidine-3'-phosphate
  modified_base 21: mod_base = OTHER; note = 2'-O-methylguanosine-3'- phosphorothioate
  modified_base 22: mod_base = OTHER; note = 2'-O-methylguanosine-3'- phosphorothioate
  modified_base 23: mod_base = OTHER; note = 2'-O-methylguanosine-3'-phosphate
aacctcgtccaggcggtcgcggg

SEQ ID NO: 513 - RNA, 23 nt, synthetic construct
  source 1..23: mol_type = other RNA; note = Description of Artificial Sequence: Synthetic oligonucleotide
  modified_base 1: mod_base = OTHER; note = 2'-O-methyladenosine-3'- phosphorothioate
  modified_base 2: mod_base = OTHER; note = 2'-fluorocytidine-3'-phosphorothioate
  modified_base 3: mod_base = OTHER; note = 2'-O-methyluridine-3'-phosphate
  modified_base 4: mod_base = OTHER; note = 2'-O-methylcytidine-3'-phosphate
  modified_base 5: mod_base = OTHER; note = 2'-O-methylcytidine-3'-phosphate
  modified_base 6: mod_base = OTHER; note = 2'-fluorouridine-3'-phosphate
  modified_base 7: mod_base = OTHER; note = 2'-O-methyluridine-3'-phosphate
  modified_base 8: mod_base = OTHER; note = 2'-fluorocytidine-3'-phosphate
  modified_base 9: mod_base = OTHER; note = 2'-fluoroadenosine-3'-phosphate
  modified_base 10: mod_base = OTHER; note = 2'-O-methylcytidine-3'-phosphate
  modified_base 11: mod_base = OTHER; note = 2'-O-methylcytidine-3'-phosphate
  modified_base 12: mod_base = OTHER; note = 2'-O-methyluridine-3'-phosphate
  modified_base 13: mod_base = OTHER; note = 2'-O-methylcytidine-3'-phosphate
  modified_base 14: mod_base = OTHER; note = 2'-fluoroguanosine-3'-phosphate
  modified_base 15: mod_base = OTHER; note = 2'-O-methyluridine-3'-phosphate
  modified_base 16: mod_base = OTHER; note = 2'-fluorocytidine-3'-phosphate
  modified_base 17: mod_base = OTHER; note = 2'-O-methylcytidine-3'-phosphate
  modified_base 18: mod_base = OTHER; note = 2'-O-methyladenosine-3'-phosphate
  modified_base 19: mod_base = OTHER; note = 2'-O-methylguanosine-3'-phosphate
  modified_base 20: mod_base = OTHER; note = 2'-O-methylguanosine-3'-phosphate
  modified_base 21: mod_base = OTHER; note = 2'-O-methylcytidine-3'- phosphorothioate
  modified_base 22: mod_base = OTHER; note = 2'-O-methylguanosine-3'- phosphorothioate
  modified_base 23: mod_base = OTHER; note = 2'-O-methylguanosine-3'-phosphate
actccttcacctcgtccaggcgg

SEQ ID NO: 514 - RNA, 23 nt, synthetic construct
  source 1..23: mol_type = other RNA; note = Description of Artificial Sequence: Synthetic oligonucleotide
  modified_base 1: mod_base = OTHER; note = 2'-O-methyladenosine-3'- phosphorothioate
  modified_base 2: mod_base = OTHER; note = 2'-fluoroadenosine-3'-phosphorothioate
  modified_base 3: mod_base = OTHER; note = 2'-O-methylcytidine-3'-phosphate
  modified_base 4: mod_base = OTHER; note = 2'-O-methylcytidine-3'-phosphate
  modified_base 5: mod_base = OTHER; note = 2'-O-methyluridine-3'-phosphate
  modified_base 6: mod_base = OTHER; note = 2'-fluoroguanosine-3'-phosphate
  modified_base 7: mod_base = OTHER; note = 2'-O-methylcytidine-3'-phosphate
  modified_base 8: mod_base = OTHER; note = 2'-fluorouridine-3'-phosphate
  modified_base 9: mod_base = OTHER; note = 2'-fluorocytidine-3'-phosphate
  modified_base 10: mod_base = OTHER; note = 2'-O-methylcytidine-3'-phosphate
  modified_base 11: mod_base = OTHER; note = 2'-O-methyluridine-3'-phosphate
  modified_base 12: mod_base = OTHER; note = 2'-O-methyluridine-3'-phosphate
  modified_base 13: mod_base = OTHER; note = 2'-O-methylcytidine-3'-phosphate
  modified_base 14: mod_base = OTHER; note = 2'-fluoroadenosine-3'-phosphate
  modified_base 15: mod_base = OTHER; note = 2'-O-methylcytidine-3'-phosphate
  modified_base 16: mod_base = OTHER; note = 2'-fluorocytidine-3'-phosphate
  modified_base 17: mod_base = OTHER; note = 2'-O-methyluridine-3'-phosphate
  modified_base 18: mod_base = OTHER; note = 2'-O-methylcytidine-3'-phosphate
  modified_base 19: mod_base = OTHER; note = 2'-O-methylguanosine-3'-phosphate
  modified_base 20: mod_base = OTHER; note = 2'-O-methyluridine-3'-phosphate
  modified_base 21: mod_base = OTHER; note = 2'-O-methylcytidine-3'- phosphorothioate
  modified_base 22: mod_base = OTHER; note = 2'-O-methylcytidine-3'- phosphorothioate
  modified_base 23: mod_base = OTHER; note = 2'-O-methyladenosine-3'-phosphate
aacctgctccttcacctcgtcca

SEQ ID NO: 515 - RNA, 23 nt, synthetic construct
  source 1..23: mol_type = other RNA; note = Description of Artificial Sequence: Synthetic oligonucleotide
  modified_base 1: mod_base = OTHER; note = 2'-O-methyladenosine-3'- phosphorothioate
  modified_base 2: mod_base = OTHER; note = 2'-fluorocytidine-3'-phosphorothioate
  modified_base 3: mod_base = OTHER; note = 2'-O-methylcytidine-3'-phosphate
  modified_base 4: mod_base = OTHER; note = 2'-O-methyladenosine-3'-phosphate
  modified_base 5: mod_base = OTHER; note = 2'-O-methylguanosine-3'-phosphate
  modified_base 6: mod_base = OTHER; note = 2'-fluorocytidine-3'-phosphate
  modified_base 7: mod_base = OTHER; note = 2'-O-methyluridine-3'-phosphate
  modified_base 8: mod_base = OTHER; note = 2'-fluorouridine-3'-phosphate
  modified_base 9: mod_base = OTHER; note = 2'-fluoroguanosine-3'-phosphate
  modified_base 10: mod_base = OTHER; note = 2'-O-methylguanosine-3'-phosphate
  modified_base 11: mod_base = OTHER; note = 2'-O-methylcytidine-3'-phosphate
  modified_base 12: mod_base = OTHER; note = 2'-O-methylguanosine-3'-phosphate
  modified_base 13: mod_base = OTHER; note = 2'-O-methylcytidine-3'-phosphate
  modified_base 14: mod_base = OTHER; note = 2'-fluoroguanosine-3'-phosphate
  modified_base 15: mod_base = OTHER; note = 2'-O-methylcytidine-3'-phosphate
  modified_base 16: mod_base = OTHER; note = 2'-fluoroadenosine-3'-phosphate
  modified_base 17: mod_base = OTHER; note = 2'-O-methylcytidine-3'-phosphate
  modified_base 18: mod_base = OTHER; note = 2'-O-methylcytidine-3'-phosphate
  modified_base 19: mod_base = OTHER; note = 2'-O-methyluridine-3'-phosphate
  modified_base 20: mod_base = OTHER; note = 2'-O-methylcytidine-3'-phosphate
  modified_base 21: mod_base = OTHER; note = 2'-O-methylcytidine-3'- phosphorothioate
  modified_base 22: mod_base = OTHER; note = 2'-O-methylguanosine-3'- phosphorothioate
  modified_base 23: mod_base = OTHER; note = 2'-O-methylcytidine-3'-phosphate
accagcttggcgcgcacctccgc

SEQ ID NO: 516 - RNA, 23 nt, synthetic construct
  source 1..23: mol_type = other RNA; note = Description of Artificial Sequence: Synthetic oligonucleotide
  modified_base 1: mod_base = OTHER; note = 2'-O-methyladenosine-3'- phosphorothioate
  modified_base 2: mod_base = OTHER; note = 2'-fluorouridine -3'-phosphorothioate
  modified_base 3: mod_base = OTHER; note = 2'-O-methylguanosine-3'-phosphate
  modified_base 4: mod_base = OTHER; note = 2'-O-methylcytidine-3'-phosphate
  modified_base 5: mod_base = OTHER; note = 2'-O-methyluridine-3'-phosphate
  modified_base 6: mod_base = OTHER; note = 2'-fluorocytidine-3'-phosphate
  modified_base 7: mod_base = OTHER; note = 2'-O-methylcytidine-3'-phosphate
  modified_base 8: mod_base = OTHER; note = 2'-fluorouridine-3'-phosphate
  modified_base 9: mod_base = OTHER; note = 2'-fluorocytidine-3'-phosphate
  modified_base 10: mod_base = OTHER; note = 2'-O-methylcytidine-3'-phosphate
  modified_base 11: mod_base = OTHER; note = 2'-O-methyladenosine-3'-phosphate
  modified_base 12: mod_base = OTHER; note = 2'-O-methylguanosine-3'-phosphate
  modified_base 13: mod_base = OTHER; note = 2'-O-methylcytidine-3'-phosphate
  modified_base 14: mod_base = OTHER; note = 2'-fluorouridine-3'-phosphate
  modified_base 15: mod_base = OTHER; note = 2'-O-methyluridine-3'-phosphate
  modified_base 16: mod_base = OTHER; note = 2'-fluoroguanosine-3'-phosphate
  modified_base 17: mod_base = OTHER; note = 2'-O-methylguanosine-3'-phosphate
  modified_base 18: mod_base = OTHER; note = 2'-O-methylcytidine-3'-phosphate
  modified_base 19: mod_base = OTHER; note = 2'-O-methylguanosine-3'-phosphate
  modified_base 20: mod_base = OTHER; note = 2'-O-methylcytidine-3'-phosphate
  modified_base 21: mod_base = OTHER; note = 2'-O-methylguanosine-3'- phosphorothioate
  modified_base 22: mod_base = OTHER; note = 2'-O-methylcytidine-3'- phosphorothioate
  modified_base 23: mod_base = OTHER; note = 2'-O-methyladenosine-3'-phosphate
atgctcctccagcttggcgcgca

SEQ ID NO: 517 - RNA, 23 nt, synthetic construct
  source 1..23: mol_type = other RNA; note = Description of Artificial Sequence: Synthetic oligonucleotide
  modified_base 1: mod_base = OTHER; note = 2'-O-methyladenosine-3'- phosphorothioate
  modified_base 2: mod_base = OTHER; note = 2'-fluoroadenosine-3'-phosphorothioate
  modified_base 3: mod_base = OTHER; note = 2'-O-methylguanosine-3'-phosphate
  modified_base 4: mod_base = OTHER; note = 2'-O-methylguanosine-3'-phosphate
  modified_base 5: mod_base = OTHER; note = 2'-O-methylcytidine-3'-phosphate
  modified_base 6: mod_base = OTHER; note = 2'-fluoroguanosine-3'-phosphate
  modified_base 7: mod_base = OTHER; note = 2'-O-methyluridine-3'-phosphate
  modified_base 8: mod_base = OTHER; note = 2'-fluoroadenosine-3'-phosphate
  modified_base 9: mod_base = OTHER; note = 2'-fluorouridine-3'-phosphate
  modified_base 10: mod_base = OTHER; note = 2'-O-methylcytidine-3'-phosphate
  modified_base 11: mod_base = OTHER; note = 2'-O-methyluridine-3'-phosphate
  modified_base 12: mod_base = OTHER; note = 2'-O-methylguanosine-3'-phosphate
  modified_base 13: mod_base = OTHER; note = 2'-O-methylcytidine-3'-phosphate
  modified_base 14: mod_base = OTHER; note = 2'-fluorouridine-3'-phosphate
  modified_base 15: mod_base = OTHER; note = 2'-O-methylguanosine-3'-phosphate
  modified_base 16: mod_base = OTHER; note = 2'-fluoroguanosine-3'-phosphate
  modified_base 17: mod_base = OTHER; note = 2'-O-methylguanosine-3'-phosphate
  modified_base 18: mod_base = OTHER; note = 2'-O-methylcytidine-3'-phosphate
  modified_base 19: mod_base = OTHER; note = 2'-O-methylcytidine-3'-phosphate
  modified_base 20: mod_base = OTHER; note = 2'-O-methyluridine-3'-phosphate
  modified_base 21: mod_base = OTHER; note = 2'-O-methylguanosine-3'- phosphorothioate
  modified_base 22: mod_base = OTHER; note = 2'-O-methylcytidine-3'- phosphorothioate
  modified_base 23: mod_base = OTHER; note = 2'-O-methyluridine-3'-phosphate
aaggcgtatctgctgggcctgct

SEQ ID NO: 518 - RNA, 23 nt, synthetic construct
  source 1..23: mol_type = other RNA; note = Description of Artificial Sequence: Synthetic oligonucleotide
  modified_base 1: mod_base = OTHER; note = 2'-O-methyladenosine-3'- phosphorothioate
  modified_base 2: mod_base = OTHER; note = 2'-fluorocytidine-3'-phosphorothioate
  modified_base 3: mod_base = OTHER; note = 2'-O-methylcytidine-3'-phosphate
  modified_base 4: mod_base = OTHER; note = 2'-O-methyluridine-3'-phosphate
  modified_base 5: mod_base = OTHER; note = 2'-O-methylguanosine-3'-phosphate
  modified_base 6: mod_base = OTHER; note = 2'-fluorocytidine-3'-phosphate
  modified_base 7: mod_base = OTHER; note = 2'-O-methyladenosine-3'-phosphate
  modified_base 8: mod_base = OTHER; note = 2'-fluoroguanosine-3'-phosphate
  modified_base 9: mod_base = OTHER; note = 2'-fluoroguanosine-3'-phosphate
  modified_base 10: mod_base = OTHER; note = 2'-O-methylcytidine-3'-phosphate
  modified_base 11: mod_base = OTHER; note = 2'-O-methylguanosine-3'-phosphate
  modified_base 12: mod_base = OTHER; note = 2'-O-methyluridine-3'-phosphate
  modified_base 13: mod_base = OTHER; note = 2'-O-methyladenosine-3'-phosphate
  modified_base 14: mod_base = OTHER; note = 2'-fluorouridine-3'-phosphate
  modified_base 15: mod_base = OTHER; note = 2'-O-methylcytidine-3'-phosphate
  modified_base 16: mod_base = OTHER; note = 2'-fluorouridine-3'-phosphate
  modified_base 17: mod_base = OTHER; note = 2'-O-methylguanosine-3'-phosphate
  modified_base 18: mod_base = OTHER; note = 2'-O-methylcytidine-3'-phosphate
  modified_base 19: mod_base = OTHER; note = 2'-O-methyluridine-3'-phosphate
  modified_base 20: mod_base = OTHER; note = 2'-O-methylguanosine-3'-phosphate
  modified_base 21: mod_base = OTHER; note = 2'-O-methylguanosine-3'- phosphorothioate
  modified_base 22: mod_base = OTHER; note = 2'-O-methylguanosine-3'- phosphorothioate
  modified_base 23: mod_base = OTHER; note = 2'-O-methylcytidine-3'-phosphate
acctgcaggcgtatctgctgggc

SEQ ID NO: 519 - RNA, 23 nt, synthetic construct
  source 1..23: mol_type = other RNA; note = Description of Artificial Sequence: Synthetic oligonucleotide
  modified_base 1: mod_base = OTHER; note = 2'-O-methyladenosine-3'- phosphorothioate
  modified_base 2: mod_base = OTHER; note = 2'-fluoroadenosine-3'-phosphorothioate
  modified_base 3: mod_base = OTHER; note = 2'-O-methyladenosine-3'-phosphate
  modified_base 4: mod_base = OTHER; note = 2'-O-methylguanosine-3'-phosphate
  modified_base 5: mod_base = OTHER; note = 2'-O-methylguanosine-3'-phosphate
  modified_base 6: mod_base = OTHER; note = 2'-fluorocytidine-3'-phosphate
  modified_base 7: mod_base = OTHER; note = 2'-O-methylcytidine-3'-phosphate
  modified_base 8: mod_base = OTHER; note = 2'-fluorouridine-3'-phosphate
  modified_base 9: mod_base = OTHER; note = 2'-fluorocytidine-3'-phosphate
  modified_base 10: mod_base = OTHER; note = 2'-O-methylguanosine-3'-phosphate
  modified_base 11: mod_base = OTHER; note = 2'-O-methylguanosine-3'-phosphate
  modified_base 12: mod_base = OTHER; note = 2'-O-methylcytidine-3'-phosphate
  modified_base 13: mod_base = OTHER; note = 2'-O-methylcytidine-3'-phosphate
  modified_base 14: mod_base = OTHER; note = 2'-fluorouridine-3'-phosphate
  modified_base 15: mod_base = OTHER; note = 2'-O-methylguanosine-3'-phosphate
  modified_base 16: mod_base = OTHER; note = 2'-fluorocytidine-3'-phosphate
  modified_base 17: mod_base = OTHER; note = 2'-O-methyladenosine-3'-phosphate
  modified_base 18: mod_base = OTHER; note = 2'-O-methylguanosine-3'-phosphate
  modified_base 19: mod_base = OTHER; note = 2'-O-methylguanosine-3'-phosphate
  modified_base 20: mod_base = OTHER; note = 2'-O-methylcytidine-3'-phosphate
  modified_base 21: mod_base = OTHER; note = 2'-O-methylguanosine-3'- phosphorothioate
  modified_base 22: mod_base = OTHER; note = 2'-O-methyluridine-3'-phosphorothioate
  modified_base 23: mod_base = OTHER; note = 2'-O-methyladenosine-3'-phosphate
aaaggcctcggcctgcaggcgta

SEQ ID NO: 520 - RNA, 23 nt, synthetic construct
  source 1..23: mol_type = other RNA; note = Description of Artificial Sequence: Synthetic oligonucleotide
  modified_base 1: mod_base = OTHER; note = 2'-O-methyladenosine-3'- phosphorothioate
  modified_base 2: mod_base = OTHER; note = 2'-fluorocytidine-3'-phosphorothioate
  modified_base 3: mod_base = OTHER; note = 2'-O-methylcytidine-3'-phosphate
  modified_base 4: mod_base = OTHER; note = 2'-O-methyluridine-3'-phosphate
  modified_base 5: mod_base = OTHER; note = 2'-O-methylguanosine-3'-phosphate
  modified_base 6: mod_base = OTHER; note = 2'-fluoroguanosine-3'-phosphate
  modified_base 7: mod_base = OTHER; note = 2'-O-methyladenosine-3'-phosphate
  modified_base 8: mod_base = OTHER; note = 2'-fluoroadenosine-3'-phosphate
  modified_base 9: mod_base = OTHER; note = 2'-fluoroguanosine-3'-phosphate
  modified_base 10: mod_base = OTHER; note = 2'-O-methylguanosine-3'-phosphate
  modified_base 11: mod_base = OTHER; note = 2'-O-methylcytidine-3'-phosphate
  modified_base 12: mod_base = OTHER; note = 2'-O-methylcytidine-3'-phosphate
  modified_base 13: mod_base = OTHER; note = 2'-O-methyluridine-3'-phosphate
  modified_base 14: mod_base = OTHER; note = 2'-fluorocytidine-3'-phosphate
  modified_base 15: mod_base = OTHER; note = 2'-O-methylguanosine-3'-phosphate
  modified_base 16: mod_base = OTHER; note = 2'-fluoroguanosine-3'-phosphate
  modified_base 17: mod_base = OTHER; note = 2'-O-methylcytidine-3'-phosphate
  modified_base 18: mod_base = OTHER; note = 2'-O-methylcytidine-3'-phosphate
  modified_base 19: mod_base = OTHER; note = 2'-O-methyluridine-3'-phosphate
  modified_base 20: mod_base = OTHER; note = 2'-O-methylguanosine-3'-phosphate
  modified_base 21: mod_base = OTHER; note = 2'-O-methylcytidine-3'- phosphorothioate
  modified_base 22: mod_base = OTHER; note = 2'-O-methyladenosine-3'- phosphorothioate
  modified_base 23: mod_base = OTHER; note = 2'-O-methylguanosine-3'-phosphate
acctggaaggcctcggcctgcag

SEQ ID NO: 521 - RNA, 23 nt, synthetic construct
  source 1..23: mol_type = other RNA; note = Description of Artificial Sequence: Synthetic oligonucleotide
  modified_base 1: mod_base = OTHER; note = 2'-O-methyladenosine-3'- phosphorothioate
  modified_base 2: mod_base = OTHER; note = 2'-fluoroguanosine-3'-phosphorothioate
  modified_base 3: mod_base = OTHER; note = 2'-O-methylcytidine-3'-phosphate
  modified_base 4: mod_base = OTHER; note = 2'-O-methylguanosine-3'-phosphate
  modified_base 5: mod_base = OTHER; note = 2'-O-methylguanosine-3'-phosphate
  modified_base 6: mod_base = OTHER; note = 2'-fluoroguanosine-3'-phosphate
  modified_base 7: mod_base = OTHER; note = 2'-O-methylcytidine-3'-phosphate
  modified_base 8: mod_base = OTHER; note = 2'-fluorocytidine-3'-phosphate
  modified_base 9: mod_base = OTHER; note = 2'-fluorouridine-3'-phosphate
  modified_base 10: mod_base = OTHER; note = 2'-O-methylguanosine-3'-phosphate
  modified_base 11: mod_base = OTHER; note = 2'-O-methylguanosine-3'-phosphate
  modified_base 12: mod_base = OTHER; note = 2'-O-methyladenosine-3'-phosphate
  modified_base 13: mod_base = OTHER; note = 2'-O-methyladenosine-3'-phosphate
  modified_base 14: mod_base = OTHER; note = 2'-fluoroguanosine-3'-phosphate
  modified_base 15: mod_base = OTHER; note = 2'-O-methylguanosine-3'-phosphate
  modified_base 16: mod_base = OTHER; note = 2'-fluorocytidine-3'-phosphate
  modified_base 17: mod_base = OTHER; note = 2'-O-methylcytidine-3'-phosphate
  modified_base 18: mod_base = OTHER; note = 2'-O-methyluridine-3'-phosphate
  modified_base 19: mod_base = OTHER; note = 2'-O-methylcytidine-3'-phosphate
  modified_base 20: mod_base = OTHER; note = 2'-O-methylguanosine-3'-phosphate
  modified_base 21: mod_base = OTHER; note = 2'-O-methylguanosine-3'- phosphorothioate
  modified_base 22: mod_base = OTHER; note = 2'-O-methylcytidine-3'- phosphorothioate
  modified_base 23: mod_base = OTHER; note = 2'-O-methylcytidine-3'-phosphate
agcgggcctggaaggcctcggcc

SEQ ID NO: 522 - RNA, 23 nt, synthetic construct
  source 1..23: mol_type = other RNA; note = Description of Artificial Sequence: Synthetic oligonucleotide
  modified_base 1: mod_base = OTHER; note = 2'-O-methyladenosine-3'- phosphorothioate
  modified_base 2: mod_base = OTHER; note = 2'-fluorouridine -3'-phosphorothioate
  modified_base 3: mod_base = OTHER; note = 2'-O-methyluridine-3'-phosphate
  modified_base 4: mod_base = OTHER; note = 2'-O-methylguanosine-3'-phosphate
  modified_base 5: mod_base = OTHER; note = 2'-O-methyladenosine-3'-phosphate
  modified_base 6: mod_base = OTHER; note = 2'-fluoroguanosine-3'-phosphate
  modified_base 7: mod_base = OTHER; note = 2'-O-methylguanosine-3'-phosphate
  modified_base 8: mod_base = OTHER; note = 2'-fluorocytidine-3'-phosphate
  modified_base 9: mod_base = OTHER; note = 2'-fluoroguanosine-3'-phosphate
  modified_base 10: mod_base = OTHER; note = 2'-O-methylguanosine-3'-phosphate
  modified_base 11: mod_base = OTHER; note = 2'-O-methylguanosine-3'-phosphate
  modified_base 12: mod_base = OTHER; note = 2'-O-methylcytidine-3'-phosphate
  modified_base 13: mod_base = OTHER; note = 2'-O-methylcytidine-3'-phosphate
  modified_base 14: mod_base = OTHER; note = 2'-fluorouridine-3'-phosphate
  modified_base 15: mod_base = OTHER; note = 2'-O-methylguanosine-3'-phosphate
  modified_base 16: mod_base = OTHER; note = 2'-fluoroguanosine-3'-phosphate
  modified_base 17: mod_base = OTHER; note = 2'-O-methyladenosine-3'-phosphate
  modified_base 18: mod_base = OTHER; note = 2'-O-methyladenosine-3'-phosphate
  modified_base 19: mod_base = OTHER; note = 2'-O-methylguanosine-3'-phosphate
  modified_base 20: mod_base = OTHER; note = 2'-O-methylguanosine-3'-phosphate
  modified_base 21: mod_base = OTHER; note = 2'-O-methylcytidine-3'- phosphorothioate
  modified_base 22: mod_base = OTHER; note = 2'-O-methylcytidine-3'- phosphorothioate
  modified_base 23: mod_base = OTHER; note = 2'-O-methyluridine-3'-phosphate
attgaggcgggcctggaaggcct

SEQ ID NO: 523 - RNA, 23 nt, synthetic construct
  source 1..23: mol_type = other RNA; note = Description of Artificial Sequence: Synthetic oligonucleotide
  modified_base 1: mod_base = OTHER; note = 2'-O-methyladenosine-3'- phosphorothioate
  modified_base 2: mod_base = OTHER; note = 2'-fluoroadenosine-3'-phosphorothioate
  modified_base 3: mod_base = OTHER; note = 2'-O-methylguanosine-3'-phosphate
  modified_base 4: mod_base = OTHER; note = 2'-O-methylcytidine-3'-phosphate
  modified_base 5: mod_base = OTHER; note = 2'-O-methyluridine-3'-phosphate
  modified_base 6: mod_base = OTHER; note = 2'-fluorocytidine-3'-phosphate
  modified_base 7: mod_base = OTHER; note = 2'-O-methyluridine-3'-phosphate
  modified_base 8: mod_base = OTHER; note = 2'-fluorouridine-3'-phosphate
  modified_base 9: mod_base = OTHER; note = 2'-fluoroguanosine-3'-phosphate
  modified_base 10: mod_base = OTHER; note = 2'-O-methyladenosine-3'-phosphate
  modified_base 11: mod_base = OTHER; note = 2'-O-methylguanosine-3'-phosphate
  modified_base 12: mod_base = OTHER; note = 2'-O-methylguanosine-3'-phosphate
  modified_base 13: mod_base = OTHER; note = 2'-O-methylcytidine-3'-phosphate
  modified_base 14: mod_base = OTHER; note = 2'-fluoroguanosine-3'-phosphate
  modified_base 15: mod_base = OTHER; note = 2'-O-methylguanosine-3'-phosphate
  modified_base 16: mod_base = OTHER; note = 2'-fluoroguanosine-3'-phosphate
  modified_base 17: mod_base = OTHER; note = 2'-O-methylcytidine-3'-phosphate
  modified_base 18: mod_base = OTHER; note = 2'-O-methylcytidine-3'-phosphate
  modified_base 19: mod_base = OTHER; note = 2'-O-methyluridine-3'-phosphate
  modified_base 20: mod_base = OTHER; note = 2'-O-methylguanosine-3'-phosphate
  modified_base 21: mod_base = OTHER; note = 2'-O-methylguanosine-3'- phosphorothioate
  modified_base 22: mod_base = OTHER; note = 2'-O-methyladenosine-3'- phosphorothioate
  modified_base 23: mod_base = OTHER; note = 2'-O-methyladenosine-3'-phosphate
aagctcttgaggcgggcctggaa

SEQ ID NO: 524 - RNA, 23 nt, synthetic construct
  source 1..23: mol_type = other RNA; note = Description of Artificial Sequence: Synthetic oligonucleotide
  modified_base 1: mod_base = OTHER; note = 2'-O-methyladenosine-3'- phosphorothioate
  modified_base 2: mod_base = OTHER; note = 2'-fluorocytidine-3'-phosphorothioate
  modified_base 3: mod_base = OTHER; note = 2'-O-methylguanosine-3'-phosphate
  modified_base 4: mod_base = OTHER; note = 2'-O-methyladenosine-3'-phosphate
  modified_base 5: mod_base = OTHER; note = 2'-O-methyladenosine-3'-phosphate
  modified_base 6: mod_base = OTHER; note = 2'-fluorocytidine-3'-phosphate
  modified_base 7: mod_base = OTHER; note = 2'-O-methylcytidine-3'-phosphate
  modified_base 8: mod_base = OTHER; note = 2'-fluoroadenosine-3'-phosphate
  modified_base 9: mod_base = OTHER; note = 2'-fluoroguanosine-3'-phosphate
  modified_base 10: mod_base = OTHER; note = 2'-O-methylcytidine-3'-phosphate
  modified_base 11: mod_base = OTHER; note = 2'-O-methyluridine-3'-phosphate
  modified_base 12: mod_base = OTHER; note = 2'-O-methylcytidine-3'-phosphate
  modified_base 13: mod_base = OTHER; note = 2'-O-methyluridine-3'-phosphate
  modified_base 14: mod_base = OTHER; note = 2'-fluorouridine-3'-phosphate
  modified_base 15: mod_base = OTHER; note = 2'-O-methylguanosine-3'-phosphate
  modified_base 16: mod_base = OTHER; note = 2'-fluoroadenosine-3'-phosphate
  modified_base 17: mod_base = OTHER; note = 2'-O-methylguanosine-3'-phosphate
  modified_base 18: mod_base = OTHER; note = 2'-O-methylguanosine-3'-phosphate
  modified_base 19: mod_base = OTHER; note = 2'-O-methylcytidine-3'-phosphate
  modified_base 20: mod_base = OTHER; note = 2'-O-methylguanosine-3'-phosphate
  modified_base 21: mod_base = OTHER; note = 2'-O-methylguanosine-3'- phosphorothioate
  modified_base 22: mod_base = OTHER; note = 2'-O-methylguanosine-3'- phosphorothioate
  modified_base 23: mod_base = OTHER; note = 2'-O-methylcytidine-3'-phosphate
acgaaccagctcttgaggcgggc

SEQ ID NO: 525 - RNA, 23 nt, synthetic construct
  source 1..23: mol_type = other RNA; note = Description of Artificial Sequence: Synthetic oligonucleotide
  modified_base 1: mod_base = OTHER; note = 2'-O-methyladenosine-3'- phosphorothioate
  modified_base 2: mod_base = OTHER; note = 2'-fluoroguanosine-3'-phosphorothioate
  modified_base 3: mod_base = OTHER; note = 2'-O-methylguanosine-3'-phosphate
  modified_base 4: mod_base = OTHER; note = 2'-O-methylguanosine-3'-phosphate
  modified_base 5: mod_base = OTHER; note = 2'-O-methylguanosine-3'-phosphate
  modified_base 6: mod_base = OTHER; note = 2'-fluorocytidine-3'-phosphate
  modified_base 7: mod_base = OTHER; note = 2'-O-methyluridine-3'-phosphate
  modified_base 8: mod_base = OTHER; note = 2'-fluorocytidine-3'-phosphate
  modified_base 9: mod_base = OTHER; note = 2'-fluoroguanosine-3'-phosphate
  modified_base 10: mod_base = OTHER; note = 2'-O-methyladenosine-3'-phosphate
  modified_base 11: mod_base = OTHER; note = 2'-O-methyladenosine-3'-phosphate
  modified_base 12: mod_base = OTHER; note = 2'-O-methylcytidine-3'-phosphate
  modified_base 13: mod_base = OTHER; note = 2'-O-methylcytidine-3'-phosphate
  modified_base 14: mod_base = OTHER; note = 2'-fluoroadenosine-3'-phosphate
  modified_base 15: mod_base = OTHER; note = 2'-O-methylguanosine-3'-phosphate
  modified_base 16: mod_base = OTHER; note = 2'-fluorocytidine-3'-phosphate
  modified_base 17: mod_base = OTHER; note = 2'-O-methyluridine-3'-phosphate
  modified_base 18: mod_base = OTHER; note = 2'-O-methylcytidine-3'-phosphate
  modified_base 19: mod_base = OTHER; note = 2'-O-methyluridine-3'-phosphate
  modified_base 20: mod_base = OTHER; note = 2'-O-methyluridine-3'-phosphate
  modified_base 21: mod_base = OTHER; note = 2'-O-methylguanosine-3'- phosphorothioate
  modified_base 22: mod_base = OTHER; note = 2'-O-methyladenosine-3'- phosphorothioate
  modified_base 23: mod_base = OTHER; note = 2'-O-methylguanosine-3'-phosphate
aggggctcgaaccagctcttgag

SEQ ID NO: 526 - RNA, 23 nt, synthetic construct
  source 1..23: mol_type = other RNA; note = Description of Artificial Sequence: Synthetic oligonucleotide
  modified_base 1: mod_base = OTHER; note = 2'-O-methyladenosine-3'- phosphorothioate
  modified_base 2: mod_base = OTHER; note = 2'-fluorocytidine-3'-phosphorothioate
  modified_base 3: mod_base = OTHER; note = 2'-O-methyladenosine-3'-phosphate
  modified_base 4: mod_base = OTHER; note = 2'-O-methyluridine-3'-phosphate
  modified_base 5: mod_base = OTHER; note = 2'-O-methylguanosine-3'-phosphate
  modified_base 6: mod_base = OTHER; note = 2'-fluorouridine-3'-phosphate
  modified_base 7: mod_base = OTHER; note = 2'-O-methylcytidine-3'-phosphate
  modified_base 8: mod_base = OTHER; note = 2'-fluorouridine-3'-phosphate
  modified_base 9: mod_base = OTHER; note = 2'-fluorouridine-3'-phosphate
  modified_base 10: mod_base = OTHER; note = 2'-O-methylcytidine-3'-phosphate
  modified_base 11: mod_base = OTHER; note = 2'-O-methylcytidine-3'-phosphate
  modified_base 12: mod_base = OTHER; note = 2'-O-methyladenosine-3'-phosphate
  modified_base 13: mod_base = OTHER; note = 2'-O-methylcytidine-3'-phosphate
  modified_base 14: mod_base = OTHER; note = 2'-fluorocytidine-3'-phosphate
  modified_base 15: mod_base = OTHER; note = 2'-O-methyladenosine-3'-phosphate
  modified_base 16: mod_base = OTHER; note = 2'-fluoroguanosine-3'-phosphate
  modified_base 17: mod_base = OTHER; note = 2'-O-methylguanosine-3'-phosphate
  modified_base 18: mod_base = OTHER; note = 2'-O-methylguanosine-3'-phosphate
  modified_base 19: mod_base = OTHER; note = 2'-O-methylguanosine-3'-phosphate
  modified_base 20: mod_base = OTHER; note = 2'-O-methylcytidine-3'-phosphate
  modified_base 21: mod_base = OTHER; note = 2'-O-methyluridine-3'-phosphorothioate
  modified_base 22: mod_base = OTHER; note = 2'-O-methylcytidine-3'- phosphorothioate
  modified_base 23: mod_base = OTHER; note = 2'-O-methylguanosine-3'-phosphate
acatgtcttccaccaggggctcg

SEQ ID NO: 527 - RNA, 23 nt, synthetic construct
  source 1..23: mol_type = other RNA; note = Description of Artificial Sequence: Synthetic oligonucleotide
  modified_base 1: mod_base = OTHER; note = 2'-O-methyladenosine-3'- phosphorothioate
  modified_base 2: mod_base = OTHER; note = 2'-fluorocytidine-3'-phosphorothioate
  modified_base 3: mod_base = OTHER; note = 2'-O-methylguanosine-3'-phosphate
  modified_base 4: mod_base = OTHER; note = 2'-O-methylcytidine-3'-phosphate
  modified_base 5: mod_base = OTHER; note = 2'-O-methyluridine-3'-phosphate
  modified_base 6: mod_base = OTHER; note = 2'-fluoroguanosine-3'-phosphate
  modified_base 7: mod_base = OTHER; note = 2'-O-methylcytidine-3'-phosphate
  modified_base 8: mod_base = OTHER; note = 2'-fluoroadenosine-3'-phosphate
  modified_base 9: mod_base = OTHER; note = 2'-fluorouridine-3'-phosphate
  modified_base 10: mod_base = OTHER; note = 2'-O-methylguanosine-3'-phosphate
  modified_base 11: mod_base = OTHER; note = 2'-O-methyluridine-3'-phosphate
  modified_base 12: mod_base = OTHER; note = 2'-O-methylcytidine-3'-phosphate
  modified_base 13: mod_base = OTHER; note = 2'-O-methyluridine-3'-phosphate
  modified_base 14: mod_base = OTHER; note = 2'-fluorouridine-3'-phosphate
  modified_base 15: mod_base = OTHER; note = 2'-O-methylcytidine-3'-phosphate
  modified_base 16: mod_base = OTHER; note = 2'-fluorocytidine-3'-phosphate
  modified_base 17: mod_base = OTHER; note = 2'-O-methyladenosine-3'-phosphate
  modified_base 18: mod_base = OTHER; note = 2'-O-methylcytidine-3'-phosphate
  modified_base 19: mod_base = OTHER; note = 2'-O-methylcytidine-3'-phosphate
  modified_base 20: mod_base = OTHER; note = 2'-O-methyladenosine-3'-phosphate
  modified_base 21: mod_base = OTHER; note = 2'-O-methylguanosine-3'- phosphorothioate
  modified_base 22: mod_base = OTHER; note = 2'-O-methylguanosine-3'- phosphorothioate
  modified_base 23: mod_base = OTHER; note = 2'-O-methylguanosine-3'-phosphate
acgctgcatgtcttccaccaggg

SEQ ID NO: 528 - RNA, 23 nt, synthetic construct
  source 1..23: mol_type = other RNA; note = Description of Artificial Sequence: Synthetic oligonucleotide
  modified_base 1: mod_base = OTHER; note = 2'-O-methyladenosine-3'- phosphorothioate
  modified_base 2: mod_base = OTHER; note = 2'-fluoroadenosine-3'-phosphorothioate
  modified_base 3: mod_base = OTHER; note = 2'-O-methylcytidine-3'-phosphate
  modified_base 4: mod_base = OTHER; note = 2'-O-methyluridine-3'-phosphate
  modified_base 5: mod_base = OTHER; note = 2'-O-methylguanosine-3'-phosphate
  modified_base 6: mod_base = OTHER; note = 2'-fluoroguanosine-3'-phosphate
  modified_base 7: mod_base = OTHER; note = 2'-O-methylcytidine-3'-phosphate
  modified_base 8: mod_base = OTHER; note = 2'-fluoroguanosine-3'-phosphate
  modified_base 9: mod_base = OTHER; note = 2'-fluorocytidine-3'-phosphate
  modified_base 10: mod_base = OTHER; note = 2'-O-methyluridine-3'-phosphate
  modified_base 11: mod_base = OTHER; note = 2'-O-methylguanosine-3'-phosphate
  modified_base 12: mod_base = OTHER; note = 2'-O-methylcytidine-3'-phosphate
  modified_base 13: mod_base = OTHER; note = 2'-O-methyladenosine-3'-phosphate
  modified_base 14: mod_base = OTHER; note = 2'-fluorouridine-3'-phosphate
  modified_base 15: mod_base = OTHER; note = 2'-O-methylguanosine-3'-phosphate
  modified_base 16: mod_base = OTHER; note = 2'-fluorouridine-3'-phosphate
  modified_base 17: mod_base = OTHER; note = 2'-O-methylcytidine-3'-phosphate
  modified_base 18: mod_base = OTHER; note = 2'-O-methyluridine-3'-phosphate
  modified_base 19: mod_base = OTHER; note = 2'-O-methyluridine-3'-phosphate
  modified_base 20: mod_base = OTHER; note = 2'-O-methylcytidine-3'-phosphate
  modified_base 21: mod_base = OTHER; note = 2'-O-methylcytidine-3'- phosphorothioate
  modified_base 22: mod_base = OTHER; note = 2'-O-methyladenosine-3'- phosphorothioate
  modified_base 23: mod_base = OTHER; note = 2'-O-methylcytidine-3'-phosphate
aactggcgctgcatgtcttccac

SEQ ID NO: 529 - RNA, 23 nt, synthetic construct
  source 1..23: mol_type = other RNA; note = Description of Artificial Sequence: Synthetic oligonucleotide
  modified_base 1: mod_base = OTHER; note = 2'-O-methyladenosine-3'- phosphorothioate
  modified_base 2: mod_base = OTHER; note = 2'-fluoroadenosine-3'-phosphorothioate
  modified_base 3: mod_base = OTHER; note = 2'-O-methylcytidine-3'-phosphate
  modified_base 4: mod_base = OTHER; note = 2'-O-methylcytidine-3'-phosphate
  modified_base 5: mod_base = OTHER; note = 2'-O-methyluridine-3'-phosphate
  modified_base 6: mod_base = OTHER; note = 2'-fluorouridine-3'-phosphate
  modified_base 7: mod_base = OTHER; note = 2'-O-methylcytidine-3'-phosphate
  modified_base 8: mod_base = OTHER; note = 2'-fluorouridine-3'-phosphate
  modified_base 9: mod_base = OTHER; note = 2'-fluorocytidine-3'-phosphate
  modified_base 10: mod_base = OTHER; note = 2'-O-methylcytidine-3'-phosphate
  modified_base 11: mod_base = OTHER; note = 2'-O-methyladenosine-3'-phosphate
  modified_base 12: mod_base = OTHER; note = 2'-O-methylcytidine-3'-phosphate
  modified_base 13: mod_base = OTHER; note = 2'-O-methylcytidine-3'-phosphate
  modified_base 14: mod_base = OTHER; note = 2'-fluoroadenosine-3'-phosphate
  modified_base 15: mod_base = OTHER; note = 2'-O-methylguanosine-3'-phosphate
  modified_base 16: mod_base = OTHER; note = 2'-fluorocytidine-3'-phosphate
  modified_base 17: mod_base = OTHER; note = 2'-O-methylcytidine-3'-phosphate
  modified_base 18: mod_base = OTHER; note = 2'-O-methylcytidine-3'-phosphate
  modified_base 19: mod_base = OTHER; note = 2'-O-methylguanosine-3'-phosphate
  modified_base 20: mod_base = OTHER; note = 2'-O-methylguanosine-3'-phosphate
  modified_base 21: mod_base = OTHER; note = 2'-O-methylcytidine-3'- phosphorothioate
  modified_base 22: mod_base = OTHER; note = 2'-O-methylcytidine-3'- phosphorothioate
  modified_base 23: mod_base = OTHER; note = 2'-O-methylcytidine-3'-phosphate
aaccttctccaccagcccggccc

SEQ ID NO: 530 - RNA, 23 nt, synthetic construct
  source 1..23: mol_type = other RNA; note = Description of Artificial Sequence: Synthetic oligonucleotide
  modified_base 1: mod_base = OTHER; note = 2'-O-methyladenosine-3'- phosphorothioate
  modified_base 2: mod_base = OTHER; note = 2'-fluorocytidine-3'-phosphorothioate
  modified_base 3: mod_base = OTHER; note = 2'-O-methylcytidine-3'-phosphate
  modified_base 4: mod_base = OTHER; note = 2'-O-methyluridine-3'-phosphate
  modified_base 5: mod_base = OTHER; note = 2'-O-methylguanosine-3'-phosphate
  modified_base 6: mod_base = OTHER; note = 2'-fluorocytidine-3'-phosphate
  modified_base 7: mod_base = OTHER; note = 2'-O-methyladenosine-3'-phosphate
  modified_base 8: mod_base = OTHER; note = 2'-fluorocytidine-3'-phosphate
  modified_base 9: mod_base = OTHER; note = 2'-fluorocytidine-3'-phosphate
  modified_base 10: mod_base = OTHER; note = 2'-O-methyluridine-3'-phosphate
  modified_base 11: mod_base = OTHER; note = 2'-O-methyluridine-3'-phosphate
  modified_base 12: mod_base = OTHER; note = 2'-O-methylcytidine-3'-phosphate
  modified_base 13: mod_base = OTHER; note = 2'-O-methyluridine-3'-phosphate
  modified_base 14: mod_base = OTHER; note = 2'-fluorocytidine-3'-phosphate
  modified_base 15: mod_base = OTHER; note = 2'-O-methylcytidine-3'-phosphate
  modified_base 16: mod_base = OTHER; note = 2'-fluoroadenosine-3'-phosphate
  modified_base 17: mod_base = OTHER; note = 2'-O-methylcytidine-3'-phosphate
  modified_base 18: mod_base = OTHER; note = 2'-O-methylcytidine-3'-phosphate
  modified_base 19: mod_base = OTHER; note = 2'-O-methyladenosine-3'-phosphate
  modified_base 20: mod_base = OTHER; note = 2'-O-methylguanosine-3'-phosphate
  modified_base 21: mod_base = OTHER; note = 2'-O-methylcytidine-3'- phosphorothioate
  modified_base 22: mod_base = OTHER; note = 2'-O-methylcytidine-3'- phosphorothioate
  modified_base 23: mod_base = OTHER; note = 2'-O-methylcytidine-3'-phosphate
acctgcaccttctccaccagccc

SEQ ID NO: 531 - RNA, 23 nt, synthetic construct
  source 1..23: mol_type = other RNA; note = Description of Artificial Sequence: Synthetic oligonucleotide
  modified_base 1: mod_base = OTHER; note = 2'-O-methyladenosine-3'- phosphorothioate
  modified_base 2: mod_base = OTHER; note = 2'-fluoroguanosine-3'-phosphorothioate
  modified_base 3: mod_base = OTHER; note = 2'-O-methylguanosine-3'-phosphate
  modified_base 4: mod_base = OTHER; note = 2'-O-methylcytidine-3'-phosphate
  modified_base 5: mod_base = OTHER; note = 2'-O-methyladenosine-3'-phosphate
  modified_base 6: mod_base = OTHER; note = 2'-fluorocytidine-3'-phosphate
  modified_base 7: mod_base = OTHER; note = 2'-O-methyladenosine-3'-phosphate
  modified_base 8: mod_base = OTHER; note = 2'-fluoroguanosine-3'-phosphate
  modified_base 9: mod_base = OTHER; note = 2'-fluoroguanosine-3'-phosphate
  modified_base 10: mod_base = OTHER; note = 2'-O-methylguanosine-3'-phosphate
  modified_base 11: mod_base = OTHER; note = 2'-O-methylguanosine-3'-phosphate
  modified_base 12: mod_base = OTHER; note = 2'-O-methylcytidine-3'-phosphate
  modified_base 13: mod_base = OTHER; note = 2'-O-methylguanosine-3'-phosphate
  modified_base 14: mod_base = OTHER; note = 2'-fluoroguanosine-3'-phosphate
  modified_base 15: mod_base = OTHER; note = 2'-O-methylcytidine-3'-phosphate
  modified_base 16: mod_base = OTHER; note = 2'-fluoroguanosine-3'-phosphate
  modified_base 17: mod_base = OTHER; note = 2'-O-methylcytidine-3'-phosphate
  modified_base 18: mod_base = OTHER; note = 2'-O-methyluridine-3'-phosphate
  modified_base 19: mod_base = OTHER; note = 2'-O-methylguanosine-3'-phosphate
  modified_base 20: mod_base = OTHER; note = 2'-O-methylguanosine-3'-phosphate
  modified_base 21: mod_base = OTHER; note = 2'-O-methyluridine-3'-phosphorothioate
  modified_base 22: mod_base = OTHER; note = 2'-O-methylguanosine-3'- phosphorothioate
  modified_base 23: mod_base = OTHER; note = 2'-O-methylcytidine-3'-phosphate
aggcacaggggcggcgctggtgc

SEQ ID NO: 532 - RNA, 23 nt, synthetic construct
  source 1..23: mol_type = other RNA; note = Description of Artificial Sequence: Synthetic oligonucleotide
  modified_base 1: mod_base = OTHER; note = 2'-O-methyladenosine-3'- phosphorothioate
  modified_base 2: mod_base = OTHER; note = 2'-fluorouridine -3'-phosphorothioate
  modified_base 3: mod_base = OTHER; note = 2'-O-methyluridine-3'-phosphate
  modified_base 4: mod_base = OTHER; note = 2'-O-methylguanosine-3'-phosphate
  modified_base 5: mod_base = OTHER; note = 2'-O-methyluridine-3'-phosphate
  modified_base 6: mod_base = OTHER; note = 2'-fluorocytidine-3'-phosphate
  modified_base 7: mod_base = OTHER; note = 2'-O-methylguanosine-3'-phosphate
  modified_base 8: mod_base = OTHER; note = 2'-fluorocytidine-3'-phosphate
  modified_base 9: mod_base = OTHER; note = 2'-fluorouridine-3'-phosphate
  modified_base 10: mod_base = OTHER; note = 2'-O-methylguanosine-3'-phosphate
  modified_base 11: mod_base = OTHER; note = 2'-O-methylguanosine-3'-phosphate
  modified_base 12: mod_base = OTHER; note = 2'-O-methylguanosine-3'-phosphate
  modified_base 13: mod_base = OTHER; note = 2'-O-methylcytidine-3'-phosphate
  modified_base 14: mod_base = OTHER; note = 2'-fluoroadenosine-3'-phosphate
  modified_base 15: mod_base = OTHER; note = 2'-O-methylcytidine-3'-phosphate
  modified_base 16: mod_base = OTHER; note = 2'-fluoroadenosine-3'-phosphate
  modified_base 17: mod_base = OTHER; note = 2'-O-methylguanosine-3'-phosphate
  modified_base 18: mod_base = OTHER; note = 2'-O-methylguanosine-3'-phosphate
  modified_base 19: mod_base = OTHER; note = 2'-O-methylguanosine-3'-phosphate
  modified_base 20: mod_base = OTHER; note = 2'-O-methylguanosine-3'-phosphate
  modified_base 21: mod_base = OTHER; note = 2'-O-methylcytidine-3'- phosphorothioate
  modified_base 22: mod_base = OTHER; note = 2'-O-methylguanosine-3'- phosphorothioate
  modified_base 23: mod_base = OTHER; note = 2'-O-methylguanosine-3'-phosphate
attgtcgctgggcacaggggcgg

SEQ ID NO: 533 - RNA, 23 nt, synthetic construct
  source 1..23: mol_type = other RNA; note = Description of Artificial Sequence: Synthetic oligonucleotide
  modified_base 1: mod_base = OTHER; note = 2'-O-methyladenosine-3'- phosphorothioate
  modified_base 2: mod_base = OTHER; note = 2'-fluoroadenosine-3'-phosphorothioate
  modified_base 3: mod_base = OTHER; note = 2'-O-methylguanosine-3'-phosphate
  modified_base 4: mod_base = OTHER; note = 2'-O-methyluridine-3'-phosphate
  modified_base 5: mod_base = OTHER; note = 2'-O-methylguanosine-3'-phosphate
  modified_base 6: mod_base = OTHER; note = 2'-fluoroadenosine-3'-phosphate
  modified_base 7: mod_base = OTHER; note = 2'-O-methyluridine-3'-phosphate
  modified_base 8: mod_base = OTHER; note = 2'-fluorouridine-3'-phosphate
  modified_base 9: mod_base = OTHER; note = 2'-fluoroguanosine-3'-phosphate
  modified_base 10: mod_base = OTHER; note = 2'-O-methyluridine-3'-phosphate
  modified_base 11: mod_base = OTHER; note = 2'-O-methylcytidine-3'-phosphate
  modified_base 12: mod_base = OTHER; note = 2'-O-methylguanosine-3'-phosphate
  modified_base 13: mod_base = OTHER; note = 2'-O-methylcytidine-3'-phosphate
  modified_base 14: mod_base = OTHER; note = 2'-fluorouridine-3'-phosphate
  modified_base 15: mod_base = OTHER; note = 2'-O-methylguanosine-3'-phosphate
  modified_base 16: mod_base = OTHER; note = 2'-fluoroguanosine-3'-phosphate
  modified_base 17: mod_base = OTHER; note = 2'-O-methylguanosine-3'-phosphate
  modified_base 18: mod_base = OTHER; note = 2'-O-methylcytidine-3'-phosphate
  modified_base 19: mod_base = OTHER; note = 2'-O-methyladenosine-3'-phosphate
  modified_base 20: mod_base = OTHER; note = 2'-O-methylcytidine-3'-phosphate
  modified_base 21: mod_base = OTHER; note = 2'-O-methyladenosine-3'- phosphorothioate
  modified_base 22: mod_base = OTHER; note = 2'-O-methylguanosine-3'- phosphorothioate
  modified_base 23: mod_base = OTHER; note = 2'-O-methylguanosine-3'-phosphate
aagtgattgtcgctgggcacagg

SEQ ID NO: 534 - RNA, 23 nt, synthetic construct
  source 1..23: mol_type = other RNA; note = Description of Artificial Sequence: Synthetic oligonucleotide
  modified_base 1: mod_base = OTHER; note = 2'-O-methyladenosine-3'- phosphorothioate
  modified_base 2: mod_base = OTHER; note = 2'-fluoroguanosine-3'-phosphorothioate
  modified_base 3: mod_base = OTHER; note = 2'-O-methylcytidine-3'-phosphate
  modified_base 4: mod_base = OTHER; note = 2'-O-methylguanosine-3'-phosphate
  modified_base 5: mod_base = OTHER; note = 2'-O-methyluridine-3'-phosphate
  modified_base 6: mod_base = OTHER; note = 2'-fluorouridine-3'-phosphate
  modified_base 7: mod_base = OTHER; note = 2'-O-methylcytidine-3'-phosphate
  modified_base 8: mod_base = OTHER; note = 2'-fluoroadenosine-3'-phosphate
  modified_base 9: mod_base = OTHER; note = 2'-fluoroguanosine-3'-phosphate
  modified_base 10: mod_base = OTHER; note = 2'-O-methyluridine-3'-phosphate
  modified_base 11: mod_base = OTHER; note = 2'-O-methylguanosine-3'-phosphate
  modified_base 12: mod_base = OTHER; note = 2'-O-methyladenosine-3'-phosphate
  modified_base 13: mod_base = OTHER; note = 2'-O-methyluridine-3'-phosphate
  modified_base 14: mod_base = OTHER; note = 2'-fluorouridine-3'-phosphate
  modified_base 15: mod_base = OTHER; note = 2'-O-methylguanosine-3'-phosphate
  modified_base 16: mod_base = OTHER; note = 2'-fluorouridine-3'-phosphate
  modified_base 17: mod_base = OTHER; note = 2'-O-methylcytidine-3'-phosphate
  modified_base 18: mod_base = OTHER; note = 2'-O-methylguanosine-3'-phosphate
  modified_base 19: mod_base = OTHER; note = 2'-O-methylcytidine-3'-phosphate
  modified_base 20: mod_base = OTHER; note = 2'-O-methyluridine-3'-phosphate
  modified_base 21: mod_base = OTHER; note = 2'-O-methylguanosine-3'- phosphorothioate
  modified_base 22: mod_base = OTHER; note = 2'-O-methylguanosine-3'- phosphorothioate
  modified_base 23: mod_base = OTHER; note = 2'-O-methylguanosine-3'-phosphate
agcgttcagtgattgtcgctggg

SEQ ID NO: 535 - RNA, 23 nt, synthetic construct
  source 1..23: mol_type = other RNA; note = Description of Artificial Sequence: Synthetic oligonucleotide
  modified_base 1: mod_base = OTHER; note = 2'-O-methyladenosine-3'- phosphorothioate
  modified_base 2: mod_base = OTHER; note = 2'-fluoroguanosine-3'-phosphorothioate
  modified_base 3: mod_base = OTHER; note = 2'-O-methylcytidine-3'-phosphate
  modified_base 4: mod_base = OTHER; note = 2'-O-methyluridine-3'-phosphate
  modified_base 5: mod_base = OTHER; note = 2'-O-methyluridine-3'-phosphate
  modified_base 6: mod_base = OTHER; note = 2'-fluorocytidine-3'-phosphate
  modified_base 7: mod_base = OTHER; note = 2'-O-methylguanosine-3'-phosphate
  modified_base 8: mod_base = OTHER; note = 2'-fluoroguanosine-3'-phosphate
  modified_base 9: mod_base = OTHER; note = 2'-fluorocytidine-3'-phosphate
  modified_base 10: mod_base = OTHER; note = 2'-O-methylguanosine-3'-phosphate
  modified_base 11: mod_base = OTHER; note = 2'-O-methyluridine-3'-phosphate
  modified_base 12: mod_base = OTHER; note = 2'-O-methyluridine-3'-phosphate
  modified_base 13: mod_base = OTHER; note = 2'-O-methylcytidine-3'-phosphate
  modified_base 14: mod_base = OTHER; note = 2'-fluoroadenosine-3'-phosphate
  modified_base 15: mod_base = OTHER; note = 2'-O-methylguanosine-3'-phosphate
  modified_base 16: mod_base = OTHER; note = 2'-fluorouridine-3'-phosphate
  modified_base 17: mod_base = OTHER; note = 2'-O-methylguanosine-3'-phosphate
  modified_base 18: mod_base = OTHER; note = 2'-O-methyladenosine-3'-phosphate
  modified_base 19: mod_base = OTHER; note = 2'-O-methyluridine-3'-phosphate
  modified_base 20: mod_base = OTHER; note = 2'-O-methyluridine-3'-phosphate
  modified_base 21: mod_base = OTHER; note = 2'-O-methylguanosine-3'- phosphorothioate
  modified_base 22: mod_base = OTHER; note = 2'-O-methyluridine-3'-phosphorothioate
  modified_base 23: mod_base = OTHER; note = 2'-O-methylcytidine-3'-phosphate
agcttcggcgttcagtgattgtc

SEQ ID NO: 536 - RNA, 23 nt, synthetic construct
  source 1..23: mol_type = other RNA; note = Description of Artificial Sequence: Synthetic oligonucleotide
  modified_base 1: mod_base = OTHER; note = 2'-O-methyladenosine-3'- phosphorothioate
  modified_base 2: mod_base = OTHER; note = 2'-fluorouridine -3'-phosphorothioate
  modified_base 3: mod_base = OTHER; note = 2'-O-methylguanosine-3'-phosphate
  modified_base 4: mod_base = OTHER; note = 2'-O-methylcytidine-3'-phosphate
  modified_base 5: mod_base = OTHER; note = 2'-O-methyladenosine-3'-phosphate
  modified_base 6: mod_base = OTHER; note = 2'-fluoroguanosine-3'-phosphate
  modified_base 7: mod_base = OTHER; note = 2'-O-methylguanosine-3'-phosphate
  modified_base 8: mod_base = OTHER; note = 2'-fluorocytidine-3'-phosphate
  modified_base 9: mod_base = OTHER; note = 2'-fluorouridine-3'-phosphate
  modified_base 10: mod_base = OTHER; note = 2'-O-methyluridine-3'-phosphate
  modified_base 11: mod_base = OTHER; note = 2'-O-methylcytidine-3'-phosphate
  modified_base 12: mod_base = OTHER; note = 2'-O-methylguanosine-3'-phosphate
  modified_base 13: mod_base = OTHER; note = 2'-O-methylguanosine-3'-phosphate
  modified_base 14: mod_base = OTHER; note = 2'-fluorocytidine-3'-phosphate
  modified_base 15: mod_base = OTHER; note = 2'-O-methylguanosine-3'-phosphate
  modified_base 16: mod_base = OTHER; note = 2'-fluorouridine-3'-phosphate
  modified_base 17: mod_base = OTHER; note = 2'-O-methyluridine-3'-phosphate
  modified_base 18: mod_base = OTHER; note = 2'-O-methylcytidine-3'-phosphate
  modified_base 19: mod_base = OTHER; note = 2'-O-methyladenosine-3'-phosphate
  modified_base 20: mod_base = OTHER; note = 2'-O-methylguanosine-3'-phosphate
  modified_base 21: mod_base = OTHER; note = 2'-O-methyluridine-3'-phosphorothioate
  modified_base 22: mod_base = OTHER; note = 2'-O-methylguanosine-3'- phosphorothioate
  modified_base 23: mod_base = OTHER; note = 2'-O-methyladenosine-3'-phosphate
atgcaggcttcggcgttcagtga

SEQ ID NO: 537 - RNA, 23 nt, synthetic construct
  source 1..23: mol_type = other RNA; note = Description of Artificial Sequence: Synthetic oligonucleotide
  modified_base 1: mod_base = OTHER; note = 2'-O-methyladenosine-3'- phosphorothioate
  modified_base 2: mod_base = OTHER; note = 2'-fluoroadenosine-3'-phosphorothioate
  modified_base 3: mod_base = OTHER; note = 2'-O-methyluridine-3'-phosphate
  modified_base 4: mod_base = OTHER; note = 2'-O-methylguanosine-3'-phosphate
  modified_base 5: mod_base = OTHER; note = 2'-O-methylguanosine-3'-phosphate
  modified_base 6: mod_base = OTHER; note = 2'-fluorocytidine-3'-phosphate
  modified_base 7: mod_base = OTHER; note = 2'-O-methyluridine-3'-phosphate
  modified_base 8: mod_base = OTHER; note = 2'-fluoroguanosine-3'-phosphate
  modified_base 9: mod_base = OTHER; note = 2'-fluorocytidine-3'-phosphate
  modified_base 10: mod_base = OTHER; note = 2'-O-methyladenosine-3'-phosphate
  modified_base 11: mod_base = OTHER; note = 2'-O-methylguanosine-3'-phosphate
  modified_base 12: mod_base = OTHER; note = 2'-O-methylguanosine-3'-phosphate
  modified_base 13: mod_base = OTHER; note = 2'-O-methylcytidine-3'-phosphate
  modified_base 14: mod_base = OTHER; note = 2'-fluorouridine-3'-phosphate
  modified_base 15: mod_base = OTHER; note = 2'-O-methyluridine-3'-phosphate
  modified_base 16: mod_base = OTHER; note = 2'-fluorocytidine-3'-phosphate
  modified_base 17: mod_base = OTHER; note = 2'-O-methylguanosine-3'-phosphate
  modified_base 18: mod_base = OTHER; note = 2'-O-methylguanosine-3'-phosphate
  modified_base 19: mod_base = OTHER; note = 2'-O-methylcytidine-3'-phosphate
  modified_base 20: mod_base = OTHER; note = 2'-O-methylguanosine-3'-phosphate
  modified_base 21: mod_base = OTHER; note = 2'-O-methyluridine-3'-phosphorothioate
  modified_base 22: mod_base = OTHER; note = 2'-O-methyluridine-3'-phosphorothioate
  modified_base 23: mod_base = OTHER; note = 2'-O-methylcytidine-3'-phosphate
aatggctgcaggcttcggcgttc

SEQ ID NO: 538 - RNA, 23 nt, synthetic construct
  source 1..23: mol_type = other RNA; note = Description of Artificial Sequence: Synthetic oligonucleotide
  modified_base 1: mod_base = OTHER; note = 2'-O-methyladenosine-3'- phosphorothioate
  modified_base 2: mod_base = OTHER; note = 2'-fluoroguanosine-3'-phosphorothioate
  modified_base 3: mod_base = OTHER; note = 2'-O-methyluridine-3'-phosphate
  modified_base 4: mod_base = OTHER; note = 2'-O-methylcytidine-3'-phosphate
  modified_base 5: mod_base = OTHER; note = 2'-O-methylguanosine-3'-phosphate
  modified_base 6: mod_base = OTHER; note = 2'-fluorocytidine-3'-phosphate
  modified_base 7: mod_base = OTHER; note = 2'-O-methyladenosine-3'-phosphate
  modified_base 8: mod_base = OTHER; note = 2'-fluorouridine-3'-phosphate
  modified_base 9: mod_base = OTHER; note = 2'-fluoroguanosine-3'-phosphate
  modified_base 10: mod_base = OTHER; note = 2'-O-methylguanosine-3'-phosphate
  modified_base 11: mod_base = OTHER; note = 2'-O-methylcytidine-3'-phosphate
  modified_base 12: mod_base = OTHER; note = 2'-O-methyluridine-3'-phosphate
  modified_base 13: mod_base = OTHER; note = 2'-O-methylguanosine-3'-phosphate
  modified_base 14: mod_base = OTHER; note = 2'-fluorocytidine-3'-phosphate
  modified_base 15: mod_base = OTHER; note = 2'-O-methyladenosine-3'-phosphate
  modified_base 16: mod_base = OTHER; note = 2'-fluoroguanosine-3'-phosphate
  modified_base 17: mod_base = OTHER; note = 2'-O-methylguanosine-3'-phosphate
  modified_base 18: mod_base = OTHER; note = 2'-O-methylcytidine-3'-phosphate
  modified_base 19: mod_base = OTHER; note = 2'-O-methyluridine-3'-phosphate
  modified_base 20: mod_base = OTHER; note = 2'-O-methyluridine-3'-phosphate
  modified_base 21: mod_base = OTHER; note = 2'-O-methylcytidine-3'- phosphorothioate
  modified_base 22: mod_base = OTHER; note = 2'-O-methylguanosine-3'- phosphorothioate
  modified_base 23: mod_base = OTHER; note = 2'-O-methylguanosine-3'-phosphate
agtcgcatggctgcaggcttcgg

SEQ ID NO: 539 - RNA, 23 nt, synthetic construct
  source 1..23: mol_type = other RNA; note = Description of Artificial Sequence: Synthetic oligonucleotide
  modified_base 1: mod_base = OTHER; note = 2'-O-methyladenosine-3'- phosphorothioate
  modified_base 2: mod_base = OTHER; note = 2'-fluorocytidine-3'-phosphorothioate
  modified_base 3: mod_base = OTHER; note = 2'-O-methylguanosine-3'-phosphate
  modified_base 4: mod_base = OTHER; note = 2'-O-methyluridine-3'-phosphate
  modified_base 5: mod_base = OTHER; note = 2'-O-methylguanosine-3'-phosphate
  modified_base 6: mod_base = OTHER; note = 2'-fluoroguanosine-3'-phosphate
  modified_base 7: mod_base = OTHER; note = 2'-O-methylguanosine-3'-phosphate
  modified_base 8: mod_base = OTHER; note = 2'-fluoroguanosine-3'-phosphate
  modified_base 9: mod_base = OTHER; note = 2'-fluorouridine-3'-phosphate
  modified_base 10: mod_base = OTHER; note = 2'-O-methylcytidine-3'-phosphate
  modified_base 11: mod_base = OTHER; note = 2'-O-methylguanosine-3'-phosphate
  modified_base 12: mod_base = OTHER; note = 2'-O-methylcytidine-3'-phosphate
  modified_base 13: mod_base = OTHER; note = 2'-O-methyladenosine-3'-phosphate
  modified_base 14: mod_base = OTHER; note = 2'-fluorouridine-3'-phosphate
  modified_base 15: mod_base = OTHER; note = 2'-O-methylguanosine-3'-phosphate
  modified_base 16: mod_base = OTHER; note = 2'-fluoroguanosine-3'-phosphate
  modified_base 17: mod_base = OTHER; note = 2'-O-methylcytidine-3'-phosphate
  modified_base 18: mod_base = OTHER; note = 2'-O-methyluridine-3'-phosphate
  modified_base 19: mod_base = OTHER; note = 2'-O-methylguanosine-3'-phosphate
  modified_base 20: mod_base = OTHER; note = 2'-O-methylcytidine-3'-phosphate
  modified_base 21: mod_base = OTHER; note = 2'-O-methyladenosine-3'- phosphorothioate
  modified_base 22: mod_base = OTHER; note = 2'-O-methylguanosine-3'- phosphorothioate
  modified_base 23: mod_base = OTHER; note = 2'-O-methylguanosine-3'-phosphate
acgtggggtcgcatggctgcagg

SEQ ID NO: 540 - RNA, 23 nt, synthetic construct
  source 1..23: mol_type = other RNA; note = Description of Artificial Sequence: Synthetic oligonucleotide
  modified_base 1: mod_base = OTHER; note = 2'-O-methyladenosine-3'- phosphorothioate
  modified_base 2: mod_base = OTHER; note = 2'-fluoroadenosine-3'-phosphorothioate
  modified_base 3: mod_base = OTHER; note = 2'-O-methylcytidine-3'-phosphate
  modified_base 4: mod_base = OTHER; note = 2'-O-methylguanosine-3'-phosphate
  modified_base 5: mod_base = OTHER; note = 2'-O-methylguanosine-3'-phosphate
  modified_base 6: mod_base = OTHER; note = 2'-fluoroguanosine-3'-phosphate
  modified_base 7: mod_base = OTHER; note = 2'-O-methylguanosine-3'-phosphate
  modified_base 8: mod_base = OTHER; note = 2'-fluorouridine-3'-phosphate
  modified_base 9: mod_base = OTHER; note = 2'-fluoroguanosine-3'-phosphate
  modified_base 10: mod_base = OTHER; note = 2'-O-methylguanosine-3'-phosphate
  modified_base 11: mod_base = OTHER; note = 2'-O-methylcytidine-3'-phosphate
  modified_base 12: mod_base = OTHER; note = 2'-O-methylguanosine-3'-phosphate
  modified_base 13: mod_base = OTHER; note = 2'-O-methyluridine-3'-phosphate
  modified_base 14: mod_base = OTHER; note = 2'-fluoroguanosine-3'-phosphate
  modified_base 15: mod_base = OTHER; note = 2'-O-methylguanosine-3'-phosphate
  modified_base 16: mod_base = OTHER; note = 2'-fluoroguanosine-3'-phosphate
  modified_base 17: mod_base = OTHER; note = 2'-O-methylguanosine-3'-phosphate
  modified_base 18: mod_base = OTHER; note = 2'-O-methyluridine-3'-phosphate
  modified_base 19: mod_base = OTHER; note = 2'-O-methylcytidine-3'-phosphate
  modified_base 20: mod_base = OTHER; note = 2'-O-methylguanosine-3'-phosphate
  modified_base 21: mod_base = OTHER; note = 2'-O-methylcytidine-3'- phosphorothioate
  modified_base 22: mod_base = OTHER; note = 2'-O-methyladenosine-3'- phosphorothioate
  modified_base 23: mod_base = OTHER; note = 2'-O-methyluridine-3'-phosphate
aacggggtggcgtggggtcgcat

SEQ ID NO: 541 - RNA, 23 nt, synthetic construct
  source 1..23: mol_type = other RNA; note = Description of Artificial Sequence: Synthetic oligonucleotide
  modified_base 1: mod_base = OTHER; note = 2'-O-methyladenosine-3'- phosphorothioate
  modified_base 2: mod_base = OTHER; note = 2'-fluoroguanosine-3'-phosphorothioate
  modified_base 3: mod_base = OTHER; note = 2'-O-methyladenosine-3'-phosphate
  modified_base 4: mod_base = OTHER; note = 2'-O-methylguanosine-3'-phosphate
  modified_base 5: mod_base = OTHER; note = 2'-O-methylguanosine-3'-phosphate
  modified_base 6: mod_base = OTHER; note = 2'-fluorocytidine-3'-phosphate
  modified_base 7: mod_base = OTHER; note = 2'-O-methyladenosine-3'-phosphate
  modified_base 8: mod_base = OTHER; note = 2'-fluorocytidine-3'-phosphate
  modified_base 9: mod_base = OTHER; note = 2'-fluoroguanosine-3'-phosphate
  modified_base 10: mod_base = OTHER; note = 2'-O-methylguanosine-3'-phosphate
  modified_base 11: mod_base = OTHER; note = 2'-O-methylguanosine-3'-phosphate
  modified_base 12: mod_base = OTHER; note = 2'-O-methylguanosine-3'-phosphate
  modified_base 13: mod_base = OTHER; note = 2'-O-methyluridine-3'-phosphate
  modified_base 14: mod_base = OTHER; note = 2'-fluoroguanosine-3'-phosphate
  modified_base 15: mod_base = OTHER; note = 2'-O-methylguanosine-3'-phosphate
  modified_base 16: mod_base = OTHER; note = 2'-fluorocytidine-3'-phosphate
  modified_base 17: mod_base = OTHER; note = 2'-O-methylguanosine-3'-phosphate
  modified_base 18: mod_base = OTHER; note = 2'-O-methyluridine-3'-phosphate
  modified_base 19: mod_base = OTHER; note = 2'-O-methylguanosine-3'-phosphate
  modified_base 20: mod_base = OTHER; note = 2'-O-methylguanosine-3'-phosphate
  modified_base 21: mod_base = OTHER; note = 2'-O-methylguanosine-3'- phosphorothioate
  modified_base 22: mod_base = OTHER; note = 2'-O-methylguanosine-3'- phosphorothioate
  modified_base 23: mod_base = OTHER; note = 2'-O-methyluridine-3'-phosphate
agaggcacggggtggcgtggggt

SEQ ID NO: 542 - RNA, 23 nt, synthetic construct
  source 1..23: mol_type = other RNA; note = Description of Artificial Sequence: Synthetic oligonucleotide
  modified_base 1: mod_base = OTHER; note = 2'-O-methyladenosine-3'- phosphorothioate
  modified_base 2: mod_base = OTHER; note = 2'-fluoroadenosine-3'-phosphorothioate
  modified_base 3: mod_base = OTHER; note = 2'-O-methylguanosine-3'-phosphate
  modified_base 4: mod_base = OTHER; note = 2'-O-methylguanosine-3'-phosphate
  modified_base 5: mod_base = OTHER; note = 2'-O-methylcytidine-3'-phosphate
  modified_base 6: mod_base = OTHER; note = 2'-fluoroadenosine-3'-phosphate
  modified_base 7: mod_base = OTHER; note = 2'-O-methylguanosine-3'-phosphate
  modified_base 8: mod_base = OTHER; note = 2'-fluoroguanosine-3'-phosphate
  modified_base 9: mod_base = OTHER; note = 2'-fluoroadenosine-3'-phosphate
  modified_base 10: mod_base = OTHER; note = 2'-O-methylguanosine-3'-phosphate
  modified_base 11: mod_base = OTHER; note = 2'-O-methylguanosine-3'-phosphate
  modified_base 12: mod_base = OTHER; note = 2'-O-methylcytidine-3'-phosphate
  modified_base 13: mod_base = OTHER; note = 2'-O-methyladenosine-3'-phosphate
  modified_base 14: mod_base = OTHER; note = 2'-fluorocytidine-3'-phosphate
  modified_base 15: mod_base = OTHER; note = 2'-O-methylguanosine-3'-phosphate
  modified_base 16: mod_base = OTHER; note = 2'-fluoroguanosine-3'-phosphate
  modified_base 17: mod_base = OTHER; note = 2'-O-methylguanosine-3'-phosphate
  modified_base 18: mod_base = OTHER; note = 2'-O-methylguanosine-3'-phosphate
  modified_base 19: mod_base = OTHER; note = 2'-O-methyluridine-3'-phosphate
  modified_base 20: mod_base = OTHER; note = 2'-O-methylguanosine-3'-phosphate
  modified_base 21: mod_base = OTHER; note = 2'-O-methylguanosine-3'- phosphorothioate
  modified_base 22: mod_base = OTHER; note = 2'-O-methylcytidine-3'- phosphorothioate
  modified_base 23: mod_base = OTHER; note = 2'-O-methylguanosine-3'-phosphate
aaggcaggaggcacggggtggcg

SEQ ID NO: 543 - RNA, 23 nt, synthetic construct
  source 1..23: mol_type = other RNA; note = Description of Artificial Sequence: Synthetic oligonucleotide
  modified_base 1: mod_base = OTHER; note = 2'-O-methyladenosine-3'- phosphorothioate
  modified_base 2: mod_base = OTHER; note = 2'-fluoroguanosine-3'-phosphorothioate
  modified_base 3: mod_base = OTHER; note = 2'-O-methylcytidine-3'-phosphate
  modified_base 4: mod_base = OTHER; note = 2'-O-methylguanosine-3'-phosphate
  modified_base 5: mod_base = OTHER; note = 2'-O-methylcytidine-3'-phosphate
  modified_base 6: mod_base = OTHER; note = 2'-fluoroguanosine-3'-phosphate
  modified_base 7: mod_base = OTHER; note = 2'-O-methylguanosine-3'-phosphate
  modified_base 8: mod_base = OTHER; note = 2'-fluoroadenosine-3'-phosphate
  modified_base 9: mod_base = OTHER; note = 2'-fluoroguanosine-3'-phosphate
  modified_base 10: mod_base = OTHER; note = 2'-O-methylguanosine-3'-phosphate
  modified_base 11: mod_base = OTHER; note = 2'-O-methylcytidine-3'-phosphate
  modified_base 12: mod_base = OTHER; note = 2'-O-methyladenosine-3'-phosphate
  modified_base 13: mod_base = OTHER; note = 2'-O-methylguanosine-3'-phosphate
  modified_base 14: mod_base = OTHER; note = 2'-fluoroguanosine-3'-phosphate
  modified_base 15: mod_base = OTHER; note = 2'-O-methyladenosine-3'-phosphate
  modified_base 16: mod_base = OTHER; note = 2'-fluoroguanosine-3'-phosphate
  modified_base 17: mod_base = OTHER; note = 2'-O-methylguanosine-3'-phosphate
  modified_base 18: mod_base = OTHER; note = 2'-O-methylcytidine-3'-phosphate
  modified_base 19: mod_base = OTHER; note = 2'-O-methyladenosine-3'-phosphate
  modified_base 20: mod_base = OTHER; note = 2'-O-methylcytidine-3'-phosphate
  modified_base 21: mod_base = OTHER; note = 2'-O-methylguanosine-3'- phosphorothioate
  modified_base 22: mod_base = OTHER; note = 2'-O-methylguanosine-3'- phosphorothioate
  modified_base 23: mod_base = OTHER; note = 2'-O-methylguanosine-3'-phosphate
agcgcggaggcaggaggcacggg

SEQ ID NO: 544 - RNA, 23 nt, synthetic construct
  source 1..23: mol_type = other RNA; note = Description of Artificial Sequence: Synthetic oligonucleotide
  modified_base 1: mod_base = OTHER; note = 2'-O-methyladenosine-3'- phosphorothioate
  modified_base 2: mod_base = OTHER; note = 2'-fluoroadenosine-3'-phosphorothioate
  modified_base 3: mod_base = OTHER; note = 2'-O-methylguanosine-3'-phosphate
  modified_base 4: mod_base = OTHER; note = 2'-O-methylguanosine-3'-phosphate
  modified_base 5: mod_base = OTHER; note = 2'-O-methylcytidine-3'-phosphate
  modified_base 6: mod_base = OTHER; note = 2'-fluorouridine-3'-phosphate
  modified_base 7: mod_base = OTHER; note = 2'-O-methylguanosine-3'-phosphate
  modified_base 8: mod_base = OTHER; note = 2'-fluorocytidine-3'-phosphate
  modified_base 9: mod_base = OTHER; note = 2'-fluoroguanosine-3'-phosphate
  modified_base 10: mod_base = OTHER; note = 2'-O-methylcytidine-3'-phosphate
  modified_base 11: mod_base = OTHER; note = 2'-O-methylguanosine-3'-phosphate
  modified_base 12: mod_base = OTHER; note = 2'-O-methylguanosine-3'-phosphate
  modified_base 13: mod_base = OTHER; note = 2'-O-methyladenosine-3'-phosphate
  modified_base 14: mod_base = OTHER; note = 2'-fluoroguanosine-3'-phosphate
  modified_base 15: mod_base = OTHER; note = 2'-O-methylguanosine-3'-phosphate
  modified_base 16: mod_base = OTHER; note = 2'-fluorocytidine-3'-phosphate
  modified_base 17: mod_base = OTHER; note = 2'-O-methyladenosine-3'-phosphate
  modified_base 18: mod_base = OTHER; note = 2'-O-methylguanosine-3'-phosphate
  modified_base 19: mod_base = OTHER; note = 2'-O-methylguanosine-3'-phosphate
  modified_base 20: mod_base = OTHER; note = 2'-O-methyladenosine-3'-phosphate
  modified_base 21: mod_base = OTHER; note = 2'-O-methylguanosine-3'- phosphorothioate
  modified_base 22: mod_base = OTHER; note = 2'-O-methylguanosine-3'- phosphorothioate
  modified_base 23: mod_base = OTHER; note = 2'-O-methylcytidine-3'-phosphate
aaggctgcgcggaggcaggaggc

SEQ ID NO: 545 - RNA, 23 nt, synthetic construct
  source 1..23: mol_type = other RNA; note = Description of Artificial Sequence: Synthetic oligonucleotide
  modified_base 1: mod_base = OTHER; note = 2'-O-methyladenosine-3'- phosphorothioate
  modified_base 2: mod_base = OTHER; note = 2'-fluoroguanosine-3'-phosphorothioate
  modified_base 3: mod_base = OTHER; note = 2'-O-methylcytidine-3'-phosphate
  modified_base 4: mod_base = OTHER; note = 2'-O-methyluridine-3'-phosphate
  modified_base 5: mod_base = OTHER; note = 2'-O-methylguanosine-3'-phosphate
  modified_base 6: mod_base = OTHER; note = 2'-fluorocytidine-3'-phosphate
  modified_base 7: mod_base = OTHER; note = 2'-O-methyladenosine-3'-phosphate
  modified_base 8: mod_base = OTHER; note = 2'-fluoroguanosine-3'-phosphate
  modified_base 9: mod_base = OTHER; note = 2'-fluoroguanosine-3'-phosphate
  modified_base 10: mod_base = OTHER; note = 2'-O-methylcytidine-3'-phosphate
  modified_base 11: mod_base = OTHER; note = 2'-O-methyluridine-3'-phosphate
  modified_base 12: mod_base = OTHER; note = 2'-O-methylguanosine-3'-phosphate
  modified_base 13: mod_base = OTHER; note = 2'-O-methylcytidine-3'-phosphate
  modified_base 14: mod_base = OTHER; note = 2'-fluoroguanosine-3'-phosphate
  modified_base 15: mod_base = OTHER; note = 2'-O-methylcytidine-3'-phosphate
  modified_base 16: mod_base = OTHER; note = 2'-fluoroguanosine-3'-phosphate
  modified_base 17: mod_base = OTHER; note = 2'-O-methylguanosine-3'-phosphate
  modified_base 18: mod_base = OTHER; note = 2'-O-methyladenosine-3'-phosphate
  modified_base 19: mod_base = OTHER; note = 2'-O-methylguanosine-3'-phosphate
  modified_base 20: mod_base = OTHER; note = 2'-O-methylguanosine-3'-phosphate
  modified_base 21: mod_base = OTHER; note = 2'-O-methylcytidine-3'- phosphorothioate
  modified_base 22: mod_base = OTHER; note = 2'-O-methyladenosine-3'- phosphorothioate
  modified_base 23: mod_base = OTHER; note = 2'-O-methylguanosine-3'-phosphate
agctgcaggctgcgcggaggcag

SEQ ID NO: 546 - RNA, 23 nt, synthetic construct
  source 1..23: mol_type = other RNA; note = Description of Artificial Sequence: Synthetic oligonucleotide
  modified_base 1: mod_base = OTHER; note = 2'-O-methyladenosine-3'- phosphorothioate
  modified_base 2: mod_base = OTHER; note = 2'-fluoroadenosine-3'-phosphorothioate
  modified_base 3: mod_base = OTHER; note = 2'-O-methylcytidine-3'-phosphate
  modified_base 4: mod_base = OTHER; note = 2'-O-methylguanosine-3'-phosphate
  modified_base 5: mod_base = OTHER; note = 2'-O-methylguanosine-3'-phosphate
  modified_base 6: mod_base = OTHER; note = 2'-fluorocytidine-3'-phosphate
  modified_base 7: mod_base = OTHER; note = 2'-O-methyluridine-3'-phosphate
  modified_base 8: mod_base = OTHER; note = 2'-fluoroguanosine-3'-phosphate
  modified_base 9: mod_base = OTHER; note = 2'-fluoroguanosine-3'-phosphate
  modified_base 10: mod_base = OTHER; note = 2'-O-methylguanosine-3'-phosphate
  modified_base 11: mod_base = OTHER; note = 2'-O-methylguanosine-3'-phosphate
  modified_base 12: mod_base = OTHER; note = 2'-O-methylcytidine-3'-phosphate
  modified_base 13: mod_base = OTHER; note = 2'-O-methylguanosine-3'-phosphate
  modified_base 14: mod_base = OTHER; note = 2'-fluoroguanosine-3'-phosphate
  modified_base 15: mod_base = OTHER; note = 2'-O-methylguanosine-3'-phosphate
  modified_base 16: mod_base = OTHER; note = 2'-fluoroguanosine-3'-phosphate
  modified_base 17: mod_base = OTHER; note = 2'-O-methyladenosine-3'-phosphate
  modified_base 18: mod_base = OTHER; note = 2'-O-methylcytidine-3'-phosphate
  modified_base 19: mod_base = OTHER; note = 2'-O-methyladenosine-3'-phosphate
  modified_base 20: mod_base = OTHER; note = 2'-O-methylguanosine-3'-phosphate
  modified_base 21: mod_base = OTHER; note = 2'-O-methylguanosine-3'- phosphorothioate
  modified_base 22: mod_base = OTHER; note = 2'-O-methylguanosine-3'- phosphorothioate
  modified_base 23: mod_base = OTHER; note = 2'-O-methyluridine-3'-phosphate
aacggctggggcggggacagggt

SEQ ID NO: 547 - RNA, 23 nt, synthetic construct
  source 1..23: mol_type = other RNA; note = Description of Artificial Sequence: Synthetic oligonucleotide
  modified_base 1: mod_base = OTHER; note = 2'-O-methyladenosine-3'- phosphorothioate
  modified_base 2: mod_base = OTHER; note = 2'-fluoroadenosine-3'-phosphorothioate
  modified_base 3: mod_base = OTHER; note = 2'-O-methylguanosine-3'-phosphate
  modified_base 4: mod_base = OTHER; note = 2'-O-methylguanosine-3'-phosphate
  modified_base 5: mod_base = OTHER; note = 2'-O-methyladenosine-3'-phosphate
  modified_base 6: mod_base = OTHER; note = 2'-fluoroguanosine-3'-phosphate
  modified_base 7: mod_base = OTHER; note = 2'-O-methylguanosine-3'-phosphate
  modified_base 8: mod_base = OTHER; note = 2'-fluoroadenosine-3'-phosphate
  modified_base 9: mod_base = OTHER; note = 2'-fluorocytidine-3'-phosphate
  modified_base 10: mod_base = OTHER; note = 2'-O-methylguanosine-3'-phosphate
  modified_base 11: mod_base = OTHER; note = 2'-O-methylguanosine-3'-phosphate
  modified_base 12: mod_base = OTHER; note = 2'-O-methylcytidine-3'-phosphate
  modified_base 13: mod_base = OTHER; note = 2'-O-methyluridine-3'-phosphate
  modified_base 14: mod_base = OTHER; note = 2'-fluoroguanosine-3'-phosphate
  modified_base 15: mod_base = OTHER; note = 2'-O-methylguanosine-3'-phosphate
  modified_base 16: mod_base = OTHER; note = 2'-fluoroguanosine-3'-phosphate
  modified_base 17: mod_base = OTHER; note = 2'-O-methylguanosine-3'-phosphate
  modified_base 18: mod_base = OTHER; note = 2'-O-methylcytidine-3'-phosphate
  modified_base 19: mod_base = OTHER; note = 2'-O-methylguanosine-3'-phosphate
  modified_base 20: mod_base = OTHER; note = 2'-O-methylguanosine-3'-phosphate
  modified_base 21: mod_base = OTHER; note = 2'-O-methylguanosine-3'- phosphorothioate
  modified_base 22: mod_base = OTHER; note = 2'-O-methylguanosine-3'- phosphorothioate
  modified_base 23: mod_base = OTHER; note = 2'-O-methyladenosine-3'-phosphate
aaggaggacggctggggcgggga

SEQ ID NO: 548 - RNA, 23 nt, synthetic construct
  source 1..23: mol_type = other RNA; note = Description of Artificial Sequence: Synthetic oligonucleotide
  modified_base 1: mod_base = OTHER; note = 2'-O-methyladenosine-3'- phosphorothioate
  modified_base 2: mod_base = OTHER; note = 2'-fluoroadenosine-3'-phosphorothioate
  modified_base 3: mod_base = OTHER; note = 2'-O-methylcytidine-3'-phosphate
  modified_base 4: mod_base = OTHER; note = 2'-O-methylcytidine-3'-phosphate
  modified_base 5: mod_base = OTHER; note = 2'-O-methylcytidine-3'-phosphate
  modified_base 6: mod_base = OTHER; note = 2'-fluorocytidine-3'-phosphate
  modified_base 7: mod_base = OTHER; note = 2'-O-methyladenosine-3'-phosphate
  modified_base 8: mod_base = OTHER; note = 2'-fluoroguanosine-3'-phosphate
  modified_base 9: mod_base = OTHER; note = 2'-fluoroguanosine-3'-phosphate
  modified_base 10: mod_base = OTHER; note = 2'-O-methyladenosine-3'-phosphate
  modified_base 11: mod_base = OTHER; note = 2'-O-methylguanosine-3'-phosphate
  modified_base 12: mod_base = OTHER; note = 2'-O-methylguanosine-3'-phosphate
  modified_base 13: mod_base = OTHER; note = 2'-O-methyladenosine-3'-phosphate
  modified_base 14: mod_base = OTHER; note = 2'-fluorocytidine-3'-phosphate
  modified_base 15: mod_base = OTHER; note = 2'-O-methylguanosine-3'-phosphate
  modified_base 16: mod_base = OTHER; note = 2'-fluoroguanosine-3'-phosphate
  modified_base 17: mod_base = OTHER; note = 2'-O-methylcytidine-3'-phosphate
  modified_base 18: mod_base = OTHER; note = 2'-O-methyluridine-3'-phosphate
  modified_base 19: mod_base = OTHER; note = 2'-O-methylguanosine-3'-phosphate
  modified_base 20: mod_base = OTHER; note = 2'-O-methylguanosine-3'-phosphate
  modified_base 21: mod_base = OTHER; note = 2'-O-methylguanosine-3'- phosphorothioate
  modified_base 22: mod_base = OTHER; note = 2'-O-methylguanosine-3'- phosphorothioate
  modified_base 23: mod_base = OTHER; note = 2'-O-methylcytidine-3'-phosphate
aaccccaggaggacggctggggc

SEQ ID NO: 549 - RNA, 23 nt, synthetic construct
  source 1..23: mol_type = other RNA; note = Description of Artificial Sequence: Synthetic oligonucleotide
  modified_base 1: mod_base = OTHER; note = 2'-O-methyladenosine-3'- phosphorothioate
  modified_base 2: mod_base = OTHER; note = 2'-fluoroadenosine-3'-phosphorothioate
  modified_base 3: mod_base = OTHER; note = 2'-O-methyladenosine-3'-phosphate
  modified_base 4: mod_base = OTHER; note = 2'-O-methylcytidine-3'-phosphate
  modified_base 5: mod_base = OTHER; note = 2'-O-methyluridine-3'-phosphate
  modified_base 6: mod_base = OTHER; note = 2'-fluoroadenosine-3'-phosphate
  modified_base 7: mod_base = OTHER; note = 2'-O-methylguanosine-3'-phosphate
  modified_base 8: mod_base = OTHER; note = 2'-fluoroguanosine-3'-phosphate
  modified_base 9: mod_base = OTHER; note = 2'-fluoroguanosine-3'-phosphate
  modified_base 10: mod_base = OTHER; note = 2'-O-methyluridine-3'-phosphate
  modified_base 11: mod_base = OTHER; note = 2'-O-methylcytidine-3'-phosphate
  modified_base 12: mod_base = OTHER; note = 2'-O-methylcytidine-3'-phosphate
  modified_base 13: mod_base = OTHER; note = 2'-O-methyladenosine-3'-phosphate
  modified_base 14: mod_base = OTHER; note = 2'-fluorocytidine-3'-phosphate
  modified_base 15: mod_base = OTHER; note = 2'-O-methylcytidine-3'-phosphate
  modified_base 16: mod_base = OTHER; note = 2'-fluorocytidine-3'-phosphate
  modified_base 17: mod_base = OTHER; note = 2'-O-methylcytidine-3'-phosphate
  modified_base 18: mod_base = OTHER; note = 2'-O-methyladenosine-3'-phosphate
  modified_base 19: mod_base = OTHER; note = 2'-O-methylguanosine-3'-phosphate
  modified_base 20: mod_base = OTHER; note = 2'-O-methylguanosine-3'-phosphate
  modified_base 21: mod_base = OTHER; note = 2'-O-methyladenosine-3'- phosphorothioate
  modified_base 22: mod_base = OTHER; note = 2'-O-methylguanosine-3'- phosphorothioate
  modified_base 23: mod_base = OTHER; note = 2'-O-methylguanosine-3'-phosphate
aaactagggtccaccccaggagg

SEQ ID NO: 550 - RNA, 23 nt, synthetic construct
  source 1..23: mol_type = other RNA; note = Description of Artificial Sequence: Synthetic oligonucleotide
  modified_base 1: mod_base = OTHER; note = 2'-O-methyladenosine-3'- phosphorothioate
  modified_base 2: mod_base = OTHER; note = 2'-fluorouridine -3'-phosphorothioate
  modified_base 3: mod_base = OTHER; note = 2'-O-methyladenosine-3'-phosphate
  modified_base 4: mod_base = OTHER; note = 2'-O-methyluridine-3'-phosphate
  modified_base 5: mod_base = OTHER; note = 2'-O-methyluridine-3'-phosphate
  modified_base 6: mod_base = OTHER; note = 2'-fluoroadenosine-3'-phosphate
  modified_base 7: mod_base = OTHER; note = 2'-O-methyladenosine-3'-phosphate
  modified_base 8: mod_base = OTHER; note = 2'-fluoroadenosine-3'-phosphate
  modified_base 9: mod_base = OTHER; note = 2'-fluorocytidine-3'-phosphate
  modified_base 10: mod_base = OTHER; note = 2'-O-methyluridine-3'-phosphate
  modified_base 11: mod_base = OTHER; note = 2'-O-methyladenosine-3'-phosphate
  modified_base 12: mod_base = OTHER; note = 2'-O-methylguanosine-3'-phosphate
  modified_base 13: mod_base = OTHER; note = 2'-O-methylguanosine-3'-phosphate
  modified_base 14: mod_base = OTHER; note = 2'-fluoroguanosine-3'-phosphate
  modified_base 15: mod_base = OTHER; note = 2'-O-methyluridine-3'-phosphate
  modified_base 16: mod_base = OTHER; note = 2'-fluorocytidine-3'-phosphate
  modified_base 17: mod_base = OTHER; note = 2'-O-methylcytidine-3'-phosphate
  modified_base 18: mod_base = OTHER; note = 2'-O-methyladenosine-3'-phosphate
  modified_base 19: mod_base = OTHER; note = 2'-O-methylcytidine-3'-phosphate
  modified_base 20: mod_base = OTHER; note = 2'-O-methylcytidine-3'-phosphate
  modified_base 21: mod_base = OTHER; note = 2'-O-methylcytidine-3'- phosphorothioate
  modified_base 22: mod_base = OTHER; note = 2'-O-methylcytidine-3'- phosphorothioate
  modified_base 23: mod_base = OTHER; note = 2'-O-methyladenosine-3'-phosphate
atattaaactagggtccacccca

SEQ ID NO: 551 - RNA, 23 nt, synthetic construct
  source 1..23: mol_type = other RNA; note = Description of Artificial Sequence: Synthetic oligonucleotide
  modified_base 1: mod_base = OTHER; note = 2'-O-methyladenosine-3'- phosphorothioate
  modified_base 2: mod_base = OTHER; note = 2'-fluoroadenosine-3'-phosphorothioate
  modified_base 3: mod_base = OTHER; note = 2'-O-methyluridine-3'-phosphate
  modified_base 4: mod_base = OTHER; note = 2'-O-methylcytidine-3'-phosphate
  modified_base 5: mod_base = OTHER; note = 2'-O-methyluridine-3'-phosphate
  modified_base 6: mod_base = OTHER; note = 2'-fluorouridine-3'-phosphate
  modified_base 7: mod_base = OTHER; note = 2'-O-methyluridine-3'-phosphate
  modified_base 8: mod_base = OTHER; note = 2'-fluoroadenosine-3'-phosphate
  modified_base 9: mod_base = OTHER; note = 2'-fluorouridine-3'-phosphate
  modified_base 10: mod_base = OTHER; note = 2'-O-methyluridine-3'-phosphate
  modified_base 11: mod_base = OTHER; note = 2'-O-methyladenosine-3'-phosphate
  modified_base 12: mod_base = OTHER; note = 2'-O-methyladenosine-3'-phosphate
  modified_base 13: mod_base = OTHER; note = 2'-O-methyladenosine-3'-phosphate
  modified_base 14: mod_base = OTHER; note = 2'-fluorocytidine-3'-phosphate
  modified_base 15: mod_base = OTHER; note = 2'-O-methyluridine-3'-phosphate
  modified_base 16: mod_base = OTHER; note = 2'-fluoroadenosine-3'-phosphate
  modified_base 17: mod_base = OTHER; note = 2'-O-methylguanosine-3'-phosphate
  modified_base 18: mod_base = OTHER; note = 2'-O-methylguanosine-3'-phosphate
  modified_base 19: mod_base = OTHER; note = 2'-O-methylguanosine-3'-phosphate
  modified_base 20: mod_base = OTHER; note = 2'-O-methyluridine-3'-phosphate
  modified_base 21: mod_base = OTHER; note = 2'-O-methylcytidine-3'- phosphorothioate
  modified_base 22: mod_base = OTHER; note = 2'-O-methylcytidine-3'- phosphorothioate
  modified_base 23: mod_base = OTHER; note = 2'-O-methyladenosine-3'-phosphate
aatctttattaaactagggtcca

SEQ ID NO: 552 - RNA, 23 nt, synthetic construct
  source 1..23: mol_type = other RNA; note = Description of Artificial Sequence: Synthetic oligonucleotide
  modified_base 1: mod_base = OTHER; note = 2'-O-methyladenosine-3'- phosphorothioate
  modified_base 2: mod_base = OTHER; note = 2'-fluoroguanosine-3'-phosphorothioate
  modified_base 3: mod_base = OTHER; note = 2'-O-methylguanosine-3'-phosphate
  modified_base 4: mod_base = OTHER; note = 2'-O-methyluridine-3'-phosphate
  modified_base 5: mod_base = OTHER; note = 2'-O-methylguanosine-3'-phosphate
  modified_base 6: mod_base = OTHER; note = 2'-fluoroadenosine-3'-phosphate
  modified_base 7: mod_base = OTHER; note = 2'-O-methyladenosine-3'-phosphate
  modified_base 8: mod_base = OTHER; note = 2'-fluorouridine-3'-phosphate
  modified_base 9: mod_base = OTHER; note = 2'-fluorocytidine-3'-phosphate
  modified_base 10: mod_base = OTHER; note = 2'-O-methyluridine-3'-phosphate
  modified_base 11: mod_base = OTHER; note = 2'-O-methyluridine-3'-phosphate
  modified_base 12: mod_base = OTHER; note = 2'-O-methyluridine-3'-phosphate
  modified_base 13: mod_base = OTHER; note = 2'-O-methyladenosine-3'-phosphate
  modified_base 14: mod_base = OTHER; note = 2'-fluorouridine-3'-phosphate
  modified_base 15: mod_base = OTHER; note = 2'-O-methyluridine-3'-phosphate
  modified_base 16: mod_base = OTHER; note = 2'-fluoroadenosine-3'-phosphate
  modified_base 17: mod_base = OTHER; note = 2'-O-methyladenosine-3'-phosphate
  modified_base 18: mod_base = OTHER; note = 2'-O-methyladenosine-3'-phosphate
  modified_base 19: mod_base = OTHER; note = 2'-O-methylcytidine-3'-phosphate
  modified_base 20: mod_base = OTHER; note = 2'-O-methyluridine-3'-phosphate
  modified_base 21: mod_base = OTHER; note = 2'-O-methyladenosine-3'- phosphorothioate
  modified_base 22: mod_base = OTHER; note = 2'-O-methylguanosine-3'- phosphorothioate
  modified_base 23: mod_base = OTHER; note = 2'-O-methylguanosine-3'-phosphate
aggtgaatctttattaaactagg

SEQ ID NO: 553 - RNA, 23 nt, synthetic construct
  source 1..23: mol_type = other RNA; note = Description of Artificial Sequence: Synthetic oligonucleotide
  modified_base 1: mod_base = OTHER; note = 2'-O-methyladenosine-3'- phosphorothioate
  modified_base 2: mod_base = OTHER; note = 2'-fluoroadenosine-3'-phosphorothioate
  modified_base 3: mod_base = OTHER; note = 2'-O-methyladenosine-3'-phosphate
  modified_base 4: mod_base = OTHER; note = 2'-O-methylcytidine-3'-phosphate
  modified_base 5: mod_base = OTHER; note = 2'-O-methyluridine-3'-phosphate
  modified_base 6: mod_base = OTHER; note = 2'-fluorouridine-3'-phosphate
  modified_base 7: mod_base = OTHER; note = 2'-O-methylguanosine-3'-phosphate
  modified_base 8: mod_base = OTHER; note = 2'-fluoroguanosine-3'-phosphate
  modified_base 9: mod_base = OTHER; note = 2'-fluorouridine-3'-phosphate
  modified_base 10: mod_base = OTHER; note = 2'-O-methylguanosine-3'-phosphate
  modified_base 11: mod_base = OTHER; note = 2'-O-methyladenosine-3'-phosphate
  modified_base 12: mod_base = OTHER; note = 2'-O-methyladenosine-3'-phosphate
  modified_base 13: mod_base = OTHER; note = 2'-O-methyluridine-3'-phosphate
  modified_base 14: mod_base = OTHER; note = 2'-fluorocytidine-3'-phosphate
  modified_base 15: mod_base = OTHER; note = 2'-O-methyluridine-3'-phosphate
  modified_base 16: mod_base = OTHER; note = 2'-fluorouridine-3'-phosphate
  modified_base 17: mod_base = OTHER; note = 2'-O-methyluridine-3'-phosphate
  modified_base 18: mod_base = OTHER; note = 2'-O-methyladenosine-3'-phosphate
  modified_base 19: mod_base = OTHER; note = 2'-O-methyluridine-3'-phosphate
  modified_base 20: mod_base = OTHER; note = 2'-O-methyluridine-3'-phosphate
  modified_base 21: mod_base = OTHER; note = 2'-O-methyladenosine-3'- phosphorothioate
  modified_base 22: mod_base = OTHER; note = 2'-O-methyladenosine-3'- phosphorothioate
  modified_base 23: mod_base = OTHER; note = 2'-O-methyladenosine-3'-phosphate
aaacttggtgaatctttattaaa

SEQ ID NO: 554 - RNA, 23 nt, synthetic construct
  source 1..23: mol_type = other RNA; note = Description of Artificial Sequence: Synthetic oligonucleotide
  modified_base 1: mod_base = OTHER; note = 2'-O-methyladenosine-3'- phosphorothioate
  modified_base 2: mod_base = OTHER; note = 2'-fluoroguanosine-3'-phosphorothioate
  modified_base 3: mod_base = OTHER; note = 2'-O-methylcytidine-3'-phosphate
  modified_base 4: mod_base = OTHER; note = 2'-O-methylguanosine-3'-phosphate
  modified_base 5: mod_base = OTHER; note = 2'-O-methyluridine-3'-phosphate
  modified_base 6: mod_base = OTHER; note = 2'-fluoroguanosine-3'-phosphate
  modified_base 7: mod_base = OTHER; note = 2'-O-methyladenosine-3'-phosphate
  modified_base 8: mod_base = OTHER; note = 2'-fluoroadenosine-3'-phosphate
  modified_base 9: mod_base = OTHER; note = 2'-fluoroadenosine-3'-phosphate
  modified_base 10: mod_base = OTHER; note = 2'-O-methylcytidine-3'-phosphate
  modified_base 11: mod_base = OTHER; note = 2'-O-methyluridine-3'-phosphate
  modified_base 12: mod_base = OTHER; note = 2'-O-methyluridine-3'-phosphate
  modified_base 13: mod_base = OTHER; note = 2'-O-methylguanosine-3'-phosphate
  modified_base 14: mod_base = OTHER; note = 2'-fluoroguanosine-3'-phosphate
  modified_base 15: mod_base = OTHER; note = 2'-O-methyluridine-3'-phosphate
  modified_base 16: mod_base = OTHER; note = 2'-fluoroguanosine-3'-phosphate
  modified_base 17: mod_base = OTHER; note = 2'-O-methyladenosine-3'-phosphate
  modified_base 18: mod_base = OTHER; note = 2'-O-methyladenosine-3'-phosphate
  modified_base 19: mod_base = OTHER; note = 2'-O-methyluridine-3'-phosphate
  modified_base 20: mod_base = OTHER; note = 2'-O-methylcytidine-3'-phosphate
  modified_base 21: mod_base = OTHER; note = 2'-O-methyluridine-3'-phosphorothioate
  modified_base 22: mod_base = OTHER; note = 2'-O-methyluridine-3'-phosphorothioate
  modified_base 23: mod_base = OTHER; note = 2'-O-methyluridine-3'-phosphate
agcgtgaaacttggtgaatcttt

SEQ ID NO: 555 - DNA, 23 bp, unidentified
  source 1..23: mol_type = unassigned DNA; note = Description of Unknown: Target sequence
ctggccaatcacaggcaggaaga

SEQ ID NO: 556 - DNA, 23 bp, unidentified
  source 1..23: mol_type = unassigned DNA; note = Description of Unknown: Target sequence
cacaggcaggaagatgaaggttc

SEQ ID NO: 557 - DNA, 23 bp, unidentified
  source 1..23: mol_type = unassigned DNA; note = Description of Unknown: Target sequence
gcaggaagatgaaggttctgtgg

SEQ ID NO: 558 - DNA, 23 bp, unidentified
  source 1..23: mol_type = unassigned DNA; note = Description of Unknown: Target sequence
agatgaaggttctgtgggctgcg

SEQ ID NO: 559 - DNA, 23 bp, unidentified
  source 1..23: mol_type = unassigned DNA; note = Description of Unknown: Target sequence
ggttctgtgggctgcgttgctgg

SEQ ID NO: 560 - DNA, 23 bp, unidentified
  source 1..23: mol_type = unassigned DNA; note = Description of Unknown: Target sequence
tgtgggctgcgttgctggtcaca

SEQ ID NO: 561 - DNA, 23 bp, unidentified
  source 1..23: mol_type = unassigned DNA; note = Description of Unknown: Target sequence
ctgcgttgctggtcacattcctg

SEQ ID NO: 562 - DNA, 23 bp, unidentified
  source 1..23: mol_type = unassigned DNA; note = Description of Unknown: Target sequence
ttgctggtcacattcctggcagg

SEQ ID NO: 563 - DNA, 23 bp, unidentified
  source 1..23: mol_type = unassigned DNA; note = Description of Unknown: Target sequence
ggtcacattcctggcaggatgcc

SEQ ID NO: 564 - DNA, 23 bp, unidentified
  source 1..23: mol_type = unassigned DNA; note = Description of Unknown: Target sequence
cctggcaggatgccaggccaagg

SEQ ID NO: 565 - DNA, 23 bp, unidentified
  source 1..23: mol_type = unassigned DNA; note = Description of Unknown: Target sequence
gccaggccaaggtggagcaagcg

SEQ ID NO: 566 - DNA, 23 bp, unidentified
  source 1..23: mol_type = unassigned DNA; note = Description of Unknown: Target sequence
ccaaggtggagcaagcggtggag

SEQ ID NO: 567 - DNA, 23 bp, unidentified
  source 1..23: mol_type = unassigned DNA; note = Description of Unknown: Target sequence
agcaagcggtggagacagagccg

SEQ ID NO: 568 - DNA, 23 bp, unidentified
  source 1..23: mol_type = unassigned DNA; note = Description of Unknown: Target sequence
gcggtggagacagagccggagcc

SEQ ID NO: 569 - DNA, 23 bp, unidentified
  source 1..23: mol_type = unassigned DNA; note = Description of Unknown: Target sequence
agcccgagctgcgccagcagacc

SEQ ID NO: 570 - DNA, 23 bp, unidentified
  source 1..23: mol_type = unassigned DNA; note = Description of Unknown: Target sequence
gagctgcgccagcagaccgagtg

SEQ ID NO: 571 - DNA, 23 bp, unidentified
  source 1..23: mol_type = unassigned DNA; note = Description of Unknown: Target sequence
cgccagcagaccgagtggcagag

SEQ ID NO: 572 - DNA, 23 bp, unidentified
  source 1..23: mol_type = unassigned DNA; note = Description of Unknown: Target sequence
gccagcgctgggaactggcactg

SEQ ID NO: 573 - DNA, 23 bp, unidentified
  source 1..23: mol_type = unassigned DNA; note = Description of Unknown: Target sequence
cgctgggaactggcactgggtcg

SEQ ID NO: 574 - DNA, 23 bp, unidentified
  source 1..23: mol_type = unassigned DNA; note = Description of Unknown: Target sequence
ggaactggcactgggtcgctttt

SEQ ID NO: 575 - DNA, 23 bp, unidentified
  source 1..23: mol_type = unassigned DNA; note = Description of Unknown: Target sequence
ggcactgggtcgcttttgggatt

SEQ ID NO: 576 - DNA, 23 bp, unidentified
  source 1..23: mol_type = unassigned DNA; note = Description of Unknown: Target sequence
gggtcgcttttgggattacctgc

SEQ ID NO: 577 - DNA, 23 bp, unidentified
  source 1..23: mol_type = unassigned DNA; note = Description of Unknown: Target sequence
gcttttgggattacctgcgctgg

SEQ ID NO: 578 - DNA, 23 bp, unidentified
  source 1..23: mol_type = unassigned DNA; note = Description of Unknown: Target sequence
acctgcgctgggtgcagacactg

SEQ ID NO: 579 - DNA, 23 bp, unidentified
  source 1..23: mol_type = unassigned DNA; note = Description of Unknown: Target sequence
gctgggtgcagacactgtctgag

SEQ ID NO: 580 - DNA, 23 bp, unidentified
  source 1..23: mol_type = unassigned DNA; note = Description of Unknown: Target sequence
tgcagacactgtctgagcaggtg

SEQ ID NO: 581 - DNA, 23 bp, unidentified
  source 1..23: mol_type = unassigned DNA; note = Description of Unknown: Target sequence
tgcaggaggagctgctcagctcc

SEQ ID NO: 582 - DNA, 23 bp, unidentified
  source 1..23: mol_type = unassigned DNA; note = Description of Unknown: Target sequence
agctgctcagctcccaggtcacc

SEQ ID NO: 583 - DNA, 23 bp, unidentified
  source 1..23: mol_type = unassigned DNA; note = Description of Unknown: Target sequence
gctcccaggtcacccaggaactg

SEQ ID NO: 584 - DNA, 23 bp, unidentified
  source 1..23: mol_type = unassigned DNA; note = Description of Unknown: Target sequence
tcacccaggaactgagggcgctg

SEQ ID NO: 585 - DNA, 23 bp, unidentified
  source 1..23: mol_type = unassigned DNA; note = Description of Unknown: Target sequence
actgagggcgctgatggacgaga

SEQ ID NO: 586 - DNA, 23 bp, unidentified
  source 1..23: mol_type = unassigned DNA; note = Description of Unknown: Target sequence
gggcgctgatggacgagaccatg

SEQ ID NO: 587 - DNA, 23 bp, unidentified
  source 1..23: mol_type = unassigned DNA; note = Description of Unknown: Target sequence
tggacgagaccatgaaggagttg

SEQ ID NO: 588 - DNA, 23 bp, unidentified
  source 1..23: mol_type = unassigned DNA; note = Description of Unknown: Target sequence
agaccatgaaggagttgaaggcc

SEQ ID NO: 589 - DNA, 23 bp, unidentified
  source 1..23: mol_type = unassigned DNA; note = Description of Unknown: Target sequence
aaggagttgaaggcctacaaatc

SEQ ID NO: 590 - DNA, 23 bp, unidentified
  source 1..23: mol_type = unassigned DNA; note = Description of Unknown: Target sequence
tgaaggcctacaaatcggaactg

SEQ ID NO: 591 - DNA, 23 bp, unidentified
  source 1..23: mol_type = unassigned DNA; note = Description of Unknown: Target sequence
ctacaaatcggaactggaggaac

SEQ ID NO: 592 - DNA, 23 bp, unidentified
  source 1..23: mol_type = unassigned DNA; note = Description of Unknown: Target sequence
aatcggaactggaggaacaactg

SEQ ID NO: 593 - DNA, 23 bp, unidentified
  source 1..23: mol_type = unassigned DNA; note = Description of Unknown: Target sequence
tggaggaacaactgaccccggtg

SEQ ID NO: 594 - DNA, 23 bp, unidentified
  source 1..23: mol_type = unassigned DNA; note = Description of Unknown: Target sequence
gacgcgggcacggctgtccaagg

SEQ ID NO: 595 - DNA, 23 bp, unidentified
  source 1..23: mol_type = unassigned DNA; note = Description of Unknown: Target sequence
gggcacggctgtccaaggagctg

SEQ ID NO: 596 - DNA, 23 bp, unidentified
  source 1..23: mol_type = unassigned DNA; note = Description of Unknown: Target sequence
cggctgtccaaggagctgcaggc

SEQ ID NO: 597 - DNA, 23 bp, unidentified
  source 1..23: mol_type = unassigned DNA; note = Description of Unknown: Target sequence
aggcccggctgggcgcggacatg

SEQ ID NO: 598 - DNA, 23 bp, unidentified
  source 1..23: mol_type = unassigned DNA; note = Description of Unknown: Target sequence
ggctgggcgcggacatggaggac

SEQ ID NO: 599 - DNA, 23 bp, unidentified
  source 1..23: mol_type = unassigned DNA; note = Description of Unknown: Target sequence
ggcgcggacatggaggacgtgcg

SEQ ID NO: 600 - DNA, 23 bp, unidentified
  source 1..23: mol_type = unassigned DNA; note = Description of Unknown: Target sequence
gcgcggacatggaggacgtgtgc

SEQ ID NO: 601 - DNA, 23 bp, unidentified
  source 1..23: mol_type = unassigned DNA; note = Description of Unknown: Target sequence
gcgcggacatggaggacgtgcgc

SEQ ID NO: 602 - DNA, 23 bp, unidentified
  source 1..23: mol_type = unassigned DNA; note = Description of Unknown: Target sequence
cgcggacatggaggacgtgcgcg

SEQ ID NO: 603 - DNA, 23 bp, unidentified
  source 1..23: mol_type = unassigned DNA; note = Description of Unknown: Target sequence
gcggacatggaggacgtgcgcgg

SEQ ID NO: 604 - DNA, 23 bp, unidentified
  source 1..23: mol_type = unassigned DNA; note = Description of Unknown: Target sequence
cggacatggaggacgtgcgcggc

SEQ ID NO: 605 - DNA, 23 bp, unidentified
  source 1..23: mol_type = unassigned DNA; note = Description of Unknown: Target sequence
ggacatggaggacgtgcgcggcc

SEQ ID NO: 606 - DNA, 23 bp, unidentified
  source 1..23: mol_type = unassigned DNA; note = Description of Unknown: Target sequence
gacatggaggacgtgcgcggccg

SEQ ID NO: 607 - DNA, 23 bp, unidentified
  source 1..23: mol_type = unassigned DNA; note = Description of Unknown: Target sequence
acatggaggacgtgcgcggccgc

SEQ ID NO: 608 - DNA, 23 bp, unidentified
  source 1..23: mol_type = unassigned DNA; note = Description of Unknown: Target sequence
catggaggacgtgcgcggccgcc

SEQ ID NO: 609 - DNA, 23 bp, unidentified
  source 1..23: mol_type = unassigned DNA; note = Description of Unknown: Target sequence
atggaggacgtgcgcggccgcct

SEQ ID NO: 610 - DNA, 23 bp, unidentified
  source 1..23: mol_type = unassigned DNA; note = Description of Unknown: Target sequence
tggaggacgtgcgcggccgcctg

SEQ ID NO: 611 - DNA, 23 bp, unidentified
  source 1..23: mol_type = unassigned DNA; note = Description of Unknown: Target sequence
ggaggacgtgcgcggccgcctgg

SEQ ID NO: 612 - DNA, 23 bp, unidentified
  source 1..23: mol_type = unassigned DNA; note = Description of Unknown: Target sequence
gaggacgtgcgcggccgcctggt

SEQ ID NO: 613 - DNA, 23 bp, unidentified
  source 1..23: mol_type = unassigned DNA; note = Description of Unknown: Target sequence
aggacgtgcgcggccgcctggtg

SEQ ID NO: 614 - DNA, 23 bp, unidentified
  source 1..23: mol_type = unassigned DNA; note = Description of Unknown: Target sequence
ggacgtgcgcggccgcctggtgc

SEQ ID NO: 615 - DNA, 23 bp, unidentified
  source 1..23: mol_type = unassigned DNA; note = Description of Unknown: Target sequence
gacgtgcgcggccgcctggtgca

SEQ ID NO: 616 - DNA, 23 bp, unidentified
  source 1..23: mol_type = unassigned DNA; note = Description of Unknown: Target sequence
acgtgcgcggccgcctggtgcag

SEQ ID NO: 617 - DNA, 23 bp, unidentified
  source 1..23: mol_type = unassigned DNA; note = Description of Unknown: Target sequence
gtgcggccgcctggtgcagtacc

SEQ ID NO: 618 - DNA, 23 bp, unidentified
  source 1..23: mol_type = unassigned DNA; note = Description of Unknown: Target sequence
gccgcctggtgcagtaccgcggc

SEQ ID NO: 619 - DNA, 23 bp, unidentified
  source 1..23: mol_type = unassigned DNA; note = Description of Unknown: Target sequence
gcgaggtgcaggccatgctcggc

SEQ ID NO: 620 - DNA, 23 bp, unidentified
  source 1..23: mol_type = unassigned DNA; note = Description of Unknown: Target sequence
aggccatgctcggccagagcacc

SEQ ID NO: 621 - DNA, 23 bp, unidentified
  source 1..23: mol_type = unassigned DNA; note = Description of Unknown: Target sequence
tcggccagagcaccgaggagctg

SEQ ID NO: 622 - DNA, 23 bp, unidentified
  source 1..23: mol_type = unassigned DNA; note = Description of Unknown: Target sequence
gagctgcgggtgcgcctcgcctc

SEQ ID NO: 623 - DNA, 23 bp, unidentified
  source 1..23: mol_type = unassigned DNA; note = Description of Unknown: Target sequence
gggtgcgcctcgcctcccacctg

SEQ ID NO: 624 - DNA, 23 bp, unidentified
  source 1..23: mol_type = unassigned DNA; note = Description of Unknown: Target sequence
ctcgcctcccacctgcgcaagct

SEQ ID NO: 625 - DNA, 23 bp, unidentified
  source 1..23: mol_type = unassigned DNA; note = Description of Unknown: Target sequence
ctcccacctgcgcaagctgcgta

SEQ ID NO: 626 - DNA, 23 bp, unidentified
  source 1..23: mol_type = unassigned DNA; note = Description of Unknown: Target sequence
acctgcgcaagctgcgtaagcgg

SEQ ID NO: 627 - DNA, 23 bp, unidentified
  source 1..23: mol_type = unassigned DNA; note = Description of Unknown: Target sequence
gcaagctgcgtaagcggctcctc

SEQ ID NO: 628 - DNA, 23 bp, unidentified
  source 1..23: mol_type = unassigned DNA; note = Description of Unknown: Target sequence
gcgtaagcggctcctccgcgatg

SEQ ID NO: 629 - DNA, 23 bp, unidentified
  source 1..23: mol_type = unassigned DNA; note = Description of Unknown: Target sequence
gcggctcctccgcgatgccgatg

SEQ ID NO: 630 - DNA, 23 bp, unidentified
  source 1..23: mol_type = unassigned DNA; note = Description of Unknown: Target sequence
tcctccgcgatgccgatgacctg

SEQ ID NO: 631 - DNA, 23 bp, unidentified
  source 1..23: mol_type = unassigned DNA; note = Description of Unknown: Target sequence
gcgatgccgatgacctgcagaag

SEQ ID NO: 632 - DNA, 23 bp, unidentified
  source 1..23: mol_type = unassigned DNA; note = Description of Unknown: Target sequence
ccgatgacctgcagaagcgcctg

SEQ ID NO: 633 - DNA, 23 bp, unidentified
  source 1..23: mol_type = unassigned DNA; note = Description of Unknown: Target sequence
acctgcagaagcgcctggcagtg

SEQ ID NO: 634 - DNA, 23 bp, unidentified
  source 1..23: mol_type = unassigned DNA; note = Description of Unknown: Target sequence
agaagcgcctggcagtgtaccag

SEQ ID NO: 635 - DNA, 23 bp, unidentified
  source 1..23: mol_type = unassigned DNA; note = Description of Unknown: Target sequence
gcctggcagtgtaccaggccggg

SEQ ID NO: 636 - DNA, 23 bp, unidentified
  source 1..23: mol_type = unassigned DNA; note = Description of Unknown: Target sequence
ccgagcgcggcctcagcgccatc

SEQ ID NO: 637 - DNA, 23 bp, unidentified
  source 1..23: mol_type = unassigned DNA; note = Description of Unknown: Target sequence
cgcggcctcagcgccatccgcga

SEQ ID NO: 638 - DNA, 23 bp, unidentified
  source 1..23: mol_type = unassigned DNA; note = Description of Unknown: Target sequence
tcagcgccatccgcgagcgcctg

SEQ ID NO: 639 - DNA, 23 bp, unidentified
  source 1..23: mol_type = unassigned DNA; note = Description of Unknown: Target sequence
cctggggcccctggtggaacagg

SEQ ID NO: 640 - DNA, 23 bp, unidentified
  source 1..23: mol_type = unassigned DNA; note = Description of Unknown: Target sequence
ggcccctggtggaacagggccgc

SEQ ID NO: 641 - DNA, 23 bp, unidentified
  source 1..23: mol_type = unassigned DNA; note = Description of Unknown: Target sequence
gccgcgtgcgggccgccactgtg

SEQ ID NO: 642 - DNA, 23 bp, unidentified
  source 1..23: mol_type = unassigned DNA; note = Description of Unknown: Target sequence
gggccgccactgtgggctccctg

SEQ ID NO: 643 - DNA, 23 bp, unidentified
  source 1..23: mol_type = unassigned DNA; note = Description of Unknown: Target sequence
tccctggccggccagccgctaca

SEQ ID NO: 644 - DNA, 23 bp, unidentified
  source 1..23: mol_type = unassigned DNA; note = Description of Unknown: Target sequence
ccggccagccgctacaggagcgg

SEQ ID NO: 645 - DNA, 23 bp, unidentified
  source 1..23: mol_type = unassigned DNA; note = Description of Unknown: Target sequence
cagccgctacaggagcgggccca

SEQ ID NO: 646 - DNA, 23 bp, unidentified
  source 1..23: mol_type = unassigned DNA; note = Description of Unknown: Target sequence
gcgcgcggatggaggagatgggc

SEQ ID NO: 647 - DNA, 23 bp, unidentified
  source 1..23: mol_type = unassigned DNA; note = Description of Unknown: Target sequence
cccgcgaccgcctggacgaggtg

SEQ ID NO: 648 - DNA, 23 bp, unidentified
  source 1..23: mol_type = unassigned DNA; note = Description of Unknown: Target sequence
ccgcctggacgaggtgaaggagc

SEQ ID NO: 649 - DNA, 23 bp, unidentified
  source 1..23: mol_type = unassigned DNA; note = Description of Unknown: Target sequence
tggacgaggtgaaggagcaggtg

SEQ ID NO: 650 - DNA, 23 bp, unidentified
  source 1..23: mol_type = unassigned DNA; note = Description of Unknown: Target sequence
gcggaggtgcgcgccaagctgga

SEQ ID NO: 651 - DNA, 23 bp, unidentified
  source 1..23: mol_type = unassigned DNA; note = Description of Unknown: Target sequence
tgcgcgccaagctggaggagcag

SEQ ID NO: 652 - DNA, 23 bp, unidentified
  source 1..23: mol_type = unassigned DNA; note = Description of Unknown: Target sequence
agcaggcccagcagatacgcctg

SEQ ID NO: 653 - DNA, 23 bp, unidentified
  source 1..23: mol_type = unassigned DNA; note = Description of Unknown: Target sequence
gcccagcagatacgcctgcaggc

SEQ ID NO: 654 - DNA, 23 bp, unidentified
  source 1..23: mol_type = unassigned DNA; note = Description of Unknown: Target sequence
tacgcctgcaggccgaggccttc

SEQ ID NO: 655 - DNA, 23 bp, unidentified
  source 1..23: mol_type = unassigned DNA; note = Description of Unknown: Target sequence
ctgcaggccgaggccttccaggc

SEQ ID NO: 656 - DNA, 23 bp, unidentified
  source 1..23: mol_type = unassigned DNA; note = Description of Unknown: Target sequence
ggccgaggccttccaggcccgcc

SEQ ID NO: 657 - DNA, 23 bp, unidentified
  source 1..23: mol_type = unassigned DNA; note = Description of Unknown: Target sequence
aggccttccaggcccgcctcaag

SEQ ID NO: 658 - DNA, 23 bp, unidentified
  source 1..23: mol_type = unassigned DNA; note = Description of Unknown: Target sequence
ttccaggcccgcctcaagagctg

SEQ ID NO: 659 - DNA, 23 bp, unidentified
  source 1..23: mol_type = unassigned DNA; note = Description of Unknown: Target sequence
gcccgcctcaagagctggttcga

SEQ ID NO: 660 - DNA, 23 bp, unidentified
  source 1..23: mol_type = unassigned DNA; note = Description of Unknown: Target sequence
ctcaagagctggttcgagcccct

SEQ ID NO: 661 - DNA, 23 bp, unidentified
  source 1..23: mol_type = unassigned DNA; note = Description of Unknown: Target sequence
cgagcccctggtggaagacatgc

SEQ ID NO: 662 - DNA, 23 bp, unidentified
  source 1..23: mol_type = unassigned DNA; note = Description of Unknown: Target sequence
ccctggtggaagacatgcagcgc

SEQ ID NO: 663 - DNA, 23 bp, unidentified
  source 1..23: mol_type = unassigned DNA; note = Description of Unknown: Target sequence
gtggaagacatgcagcgccagtg

SEQ ID NO: 664 - DNA, 23 bp, unidentified
  source 1..23: mol_type = unassigned DNA; note = Description of Unknown: Target sequence
gggccgggctggtggagaaggtg

SEQ ID NO: 665 - DNA, 23 bp, unidentified
  source 1..23: mol_type = unassigned DNA; note = Description of Unknown: Target sequence
gggctggtggagaaggtgcaggc

SEQ ID NO: 666 - DNA, 23 bp, unidentified
  source 1..23: mol_type = unassigned DNA; note = Description of Unknown: Target sequence
gcaccagcgccgcccctgtgccc

SEQ ID NO: 667 - DNA, 23 bp, unidentified
  source 1..23: mol_type = unassigned DNA; note = Description of Unknown: Target sequence
ccgcccctgtgcccagcgacaat

SEQ ID NO: 668 - DNA, 23 bp, unidentified
  source 1..23: mol_type = unassigned DNA; note = Description of Unknown: Target sequence
cctgtgcccagcgacaatcactg

SEQ ID NO: 669 - DNA, 23 bp, unidentified
  source 1..23: mol_type = unassigned DNA; note = Description of Unknown: Target sequence
cccagcgacaatcactgaacgcc

SEQ ID NO: 670 - DNA, 23 bp, unidentified
  source 1..23: mol_type = unassigned DNA; note = Description of Unknown: Target sequence
gacaatcactgaacgccgaagcc

SEQ ID NO: 671 - DNA, 23 bp, unidentified
  source 1..23: mol_type = unassigned DNA; note = Description of Unknown: Target sequence
tcactgaacgccgaagcctgcag

SEQ ID NO: 672 - DNA, 23 bp, unidentified
  source 1..23: mol_type = unassigned DNA; note = Description of Unknown: Target sequence
gaacgccgaagcctgcagccatg

SEQ ID NO: 673 - DNA, 23 bp, unidentified
  source 1..23: mol_type = unassigned DNA; note = Description of Unknown: Target sequence
ccgaagcctgcagccatgcgacc

SEQ ID NO: 674 - DNA, 23 bp, unidentified
  source 1..23: mol_type = unassigned DNA; note = Description of Unknown: Target sequence
cctgcagccatgcgaccccacgc

SEQ ID NO: 675 - DNA, 23 bp, unidentified
  source 1..23: mol_type = unassigned DNA; note = Description of Unknown: Target sequence
atgcgaccccacgccaccccgtg

SEQ ID NO: 676 - DNA, 23 bp, unidentified
  source 1..23: mol_type = unassigned DNA; note = Description of Unknown: Target sequence
accccacgccaccccgtgcctcc

SEQ ID NO: 677 - DNA, 23 bp, unidentified
  source 1..23: mol_type = unassigned DNA; note = Description of Unknown: Target sequence
cgccaccccgtgcctcctgcctc

SEQ ID NO: 678 - DNA, 23 bp, unidentified
  source 1..23: mol_type = unassigned DNA; note = Description of Unknown: Target sequence
cccgtgcctcctgcctccgcgca

SEQ ID NO: 679 - DNA, 23 bp, unidentified
  source 1..23: mol_type = unassigned DNA; note = Description of Unknown: Target sequence
gcctcctgcctccgcgcagcctg

SEQ ID NO: 680 - DNA, 23 bp, unidentified
  source 1..23: mol_type = unassigned DNA; note = Description of Unknown: Target sequence
ctgcctccgcgcagcctgcagcg

SEQ ID NO: 681 - DNA, 23 bp, unidentified
  source 1..23: mol_type = unassigned DNA; note = Description of Unknown: Target sequence
accctgtccccgccccagccgtc

SEQ ID NO: 682 - DNA, 23 bp, unidentified
  source 1..23: mol_type = unassigned DNA; note = Description of Unknown: Target sequence
tccccgccccagccgtcctcctg

SEQ ID NO: 683 - DNA, 23 bp, unidentified
  source 1..23: mol_type = unassigned DNA; note = Description of Unknown: Target sequence
gccccagccgtcctcctggggtg

SEQ ID NO: 684 - DNA, 23 bp, unidentified
  source 1..23: mol_type = unassigned DNA; note = Description of Unknown: Target sequence
cctcctggggtggaccctagttt

SEQ ID NO: 685 - DNA, 23 bp, unidentified
  source 1..23: mol_type = unassigned DNA; note = Description of Unknown: Target sequence
tggggtggaccctagtttaataa

SEQ ID NO: 686 - DNA, 23 bp, unidentified
  source 1..23: mol_type = unassigned DNA; note = Description of Unknown: Target sequence
tggaccctagtttaataaagatt

SEQ ID NO: 687 - DNA, 23 bp, unidentified
  source 1..23: mol_type = unassigned DNA; note = Description of Unknown: Target sequence
cctagtttaataaagattcacca

SEQ ID NO: 688 - DNA, 23 bp, unidentified
  source 1..23: mol_type = unassigned DNA; note = Description of Unknown: Target sequence
tttaataaagattcaccaagttt

SEQ ID NO: 689 - DNA, 23 bp, unidentified
  source 1..23: mol_type = unassigned DNA; note = Description of Unknown: Target sequence
aaagattcaccaagtttcacgca

SEQ ID NO: 690 - RNA, 21 nt, synthetic construct
  source 1..21: mol_type = other RNA; note = Description of Artificial Sequence: Synthetic oligonucleotide
caggcaggaagatgaaggtta

SEQ ID NO: 691 - RNA, 21 nt, synthetic construct
  source 1..21: mol_type = other RNA; note = Description of Artificial Sequence: Synthetic oligonucleotide
aggaagatgaaggttctgtga

SEQ ID NO: 692 - RNA, 21 nt, synthetic construct
  source 1..21: mol_type = other RNA; note = Description of Artificial Sequence: Synthetic oligonucleotide
ttctgtgggctgcgttgctga

SEQ ID NO: 693 - RNA, 21 nt, synthetic construct
  source 1..21: mol_type = other RNA; note = Description of Artificial Sequence: Synthetic oligonucleotide
gcgttgctggtcacattccta

SEQ ID NO: 694 - RNA, 21 nt, synthetic construct
  source 1..21: mol_type = other RNA; note = Description of Artificial Sequence: Synthetic oligonucleotide
cactgggtcgcttttgggata

SEQ ID NO: 695 - RNA, 21 nt, synthetic construct
  source 1..21: mol_type = other RNA; note = Description of Artificial Sequence: Synthetic oligonucleotide
gtcgcttttgggattacctga

SEQ ID NO: 696 - RNA, 21 nt, synthetic construct
  source 1..21: mol_type = other RNA; note = Description of Artificial Sequence: Synthetic oligonucleotide
ttttgggattacctgcgctga

SEQ ID NO: 697 - RNA, 21 nt, synthetic construct
  source 1..21: mol_type = other RNA; note = Description of Artificial Sequence: Synthetic oligonucleotide
ccgcctcaagagctggttcga

SEQ ID NO: 698 - RNA, 21 nt, synthetic construct
  source 1..21: mol_type = other RNA; note = Description of Artificial Sequence: Synthetic oligonucleotide
gaccctagtttaataaagata

SEQ ID NO: 699 - RNA, 21 nt, synthetic construct
  source 1..21: mol_type = other RNA; note = Description of Artificial Sequence: Synthetic oligonucleotide
cggcctcagcgccatccgcga

SEQ ID NO: 700 - RNA, 23 nt, synthetic construct
  source 1..23: mol_type = other RNA; note = Description of Artificial Sequence: Synthetic oligonucleotide
taaccttcatcttcctgcctgtg

SEQ ID NO: 701 - RNA, 23 nt, synthetic construct
  source 1..23: mol_type = other RNA; note = Description of Artificial Sequence: Synthetic oligonucleotide
tcacagaaccttcatcttcctgc

SEQ ID NO: 702 - RNA, 23 nt, synthetic construct
  source 1..23: mol_type = other RNA; note = Description of Artificial Sequence: Synthetic oligonucleotide
tcagcaacgcagcccacagaacc

SEQ ID NO: 703 - RNA, 23 nt, synthetic construct
  source 1..23: mol_type = other RNA; note = Description of Artificial Sequence: Synthetic oligonucleotide
taggaatgtgaccagcaacgcag

SEQ ID NO: 704 - RNA, 23 nt, synthetic construct
  source 1..23: mol_type = other RNA; note = Description of Artificial Sequence: Synthetic oligonucleotide
tatcccaaaagcgacccagtgcc

SEQ ID NO: 705 - RNA, 23 nt, synthetic construct
  source 1..23: mol_type = other RNA; note = Description of Artificial Sequence: Synthetic oligonucleotide
tcaggtaatcccaaaagcgaccc

SEQ ID NO: 706 - RNA, 23 nt, synthetic construct
  source 1..23: mol_type = other RNA; note = Description of Artificial Sequence: Synthetic oligonucleotide
tcagcgcaggtaatcccaaaagc

SEQ ID NO: 707 - RNA, 23 nt, synthetic construct
  source 1..23: mol_type = other RNA; note = Description of Artificial Sequence: Synthetic oligonucleotide
tcgaaccagctcttgaggcgggc

SEQ ID NO: 708 - RNA, 23 nt, synthetic construct
  source 1..23: mol_type = other RNA; note = Description of Artificial Sequence: Synthetic oligonucleotide
tatctttattaaactagggtcca

SEQ ID NO: 709 - RNA, 23 nt, synthetic construct
  source 1..23: mol_type = other RNA; note = Description of Artificial Sequence: Synthetic oligonucleotide
tcgcggatggcgctgaggccgcg

SEQ ID NO: 710 - RNA, 21 nt, synthetic construct
  source 1..21: mol_type = other RNA; note = Description of Artificial Sequence: Synthetic oligonucleotide
  modified_base 1: mod_base = OTHER; note = 2'-O-methylcytidine-3'- phosphorothioate
  modified_base 2: mod_base = OTHER; note = 2'-O-methyladenosine-3'- phosphorothioate
  modified_base 3: mod_base = OTHER; note = 2'-O-methylguanosine-3'-phosphate
  modified_base 4: mod_base = OTHER; note = 2'-O-methylguanosine-3'-phosphate
  modified_base 5: mod_base = OTHER; note = 2'-O-methylcytidine-3'-phosphate
  modified_base 6: mod_base = OTHER; note = 2'-O-hexadecyl-adenosine-3'-phosphate
  modified_base 7: mod_base = OTHER; note = 2'-fluoroguanosine-3'-phosphate
  modified_base 8: mod_base = OTHER; note = 2'-O-methylguanosine-3'-phosphate
  modified_base 9: mod_base = OTHER; note = 2'-fluoroadenosine-3'-phosphate
  modified_base 10: mod_base = OTHER; note = 2'-fluoroadenosine-3'-phosphate
  modified_base 11: mod_base = OTHER; note = 2'-fluoroguanosine-3'-phosphate
  modified_base 12: mod_base = OTHER; note = 2'-O-methyladenosine-3'-phosphate
  modified_base 13: mod_base = OTHER; note = 2'-O-methyluridine-3'-phosphate
  modified_base 14: mod_base = OTHER; note = 2'-O-methylguanosine-3'-phosphate
  modified_base 15: mod_base = OTHER; note = 2'-O-methyladenosine-3'-phosphate
  modified_base 16: mod_base = OTHER; note = 2'-O-methyladenosine-3'-phosphate
  modified_base 17: mod_base = OTHER; note = 2'-O-methylguanosine-3'-phosphate
  modified_base 18: mod_base = OTHER; note = 2'-O-methylguanosine-3'-phosphate
  modified_base 19: mod_base = OTHER; note = 2'-O-methyluridine-3'-phosphorothioate
  modified_base 20: mod_base = OTHER; note = 2'-O-methyluridine-3'-phosphorothioate
  modified_base 21: mod_base = OTHER; note = 2'-O-methyladenosine-3'-phosphate
caggcaggaagatgaaggtta

SEQ ID NO: 711 - RNA, 21 nt, synthetic construct
  source 1..21: mol_type = other RNA; note = Description of Artificial Sequence: Synthetic oligonucleotide
  modified_base 1: mod_base = OTHER; note = 2'-O-methyladenosine-3'- phosphorothioate
  modified_base 2: mod_base = OTHER; note = 2'-O-methylguanosine-3'- phosphorothioate
  modified_base 3: mod_base = OTHER; note = 2'-O-methylguanosine-3'-phosphate
  modified_base 4: mod_base = OTHER; note = 2'-O-methyladenosine-3'-phosphate
  modified_base 5: mod_base = OTHER; note = 2'-O-methyladenosine-3'-phosphate
  modified_base 6: mod_base = OTHER; note = 2'-O-hexadecyl-guanosine-3'-phosphate
  modified_base 7: mod_base = OTHER; note = 2'-fluoroadenosine-3'-phosphate
  modified_base 8: mod_base = OTHER; note = 2'-O-methyluridine-3'-phosphate
  modified_base 9: mod_base = OTHER; note = 2'-fluoroguanosine-3'-phosphate
  modified_base 10: mod_base = OTHER; note = 2'-fluoroadenosine-3'-phosphate
  modified_base 11: mod_base = OTHER; note = 2'-fluoroadenosine-3'-phosphate
  modified_base 12: mod_base = OTHER; note = 2'-O-methylguanosine-3'-phosphate
  modified_base 13: mod_base = OTHER; note = 2'-O-methylguanosine-3'-phosphate
  modified_base 14: mod_base = OTHER; note = 2'-O-methyluridine-3'-phosphate
  modified_base 15: mod_base = OTHER; note = 2'-O-methyluridine-3'-phosphate
  modified_base 16: mod_base = OTHER; note = 2'-O-methylcytidine-3'-phosphate
  modified_base 17: mod_base = OTHER; note = 2'-O-methyluridine-3'-phosphate
  modified_base 18: mod_base = OTHER; note = 2'-O-methylguanosine-3'-phosphate
  modified_base 19: mod_base = OTHER; note = 2'-O-methyluridine-3'-phosphorothioate
  modified_base 20: mod_base = OTHER; note = 2'-O-methylguanosine-3'- phosphorothioate
  modified_base 21: mod_base = OTHER; note = 2'-O-methyladenosine-3'-phosphate
aggaagatgaaggttctgtga

SEQ ID NO: 712 - RNA, 21 nt, synthetic construct
  source 1..21: mol_type = other RNA; note = Description of Artificial Sequence: Synthetic oligonucleotide
  modified_base 1: mod_base = OTHER; note = 2'-O-methyluridine-3'-phosphorothioate
  modified_base 2: mod_base = OTHER; note = 2'-O-methyluridine-3'-phosphorothioate
  modified_base 3: mod_base = OTHER; note = 2'-O-methylcytidine-3'-phosphate
  modified_base 4: mod_base = OTHER; note = 2'-O-methyluridine-3'-phosphate
  modified_base 5: mod_base = OTHER; note = 2'-O-methylguanosine-3'-phosphate
  modified_base 6: mod_base = OTHER; note = 2'-O-hexadecyl-uridine-3'-phosphate
  modified_base 7: mod_base = OTHER; note = 2'-fluoroguanosine-3'-phosphate
  modified_base 8: mod_base = OTHER; note = 2'-O-methylguanosine-3'-phosphate
  modified_base 9: mod_base = OTHER; note = 2'-fluoroguanosine-3'-phosphate
  modified_base 10: mod_base = OTHER; note = 2'-fluorocytidine-3'-phosphate
  modified_base 11: mod_base = OTHER; note = 2'-fluorouridine-3'-phosphate
  modified_base 12: mod_base = OTHER; note = 2'-O-methylguanosine-3'-phosphate
  modified_base 13: mod_base = OTHER; note = 2'-O-methylcytidine-3'-phosphate
  modified_base 14: mod_base = OTHER; note = 2'-O-methylguanosine-3'-phosphate
  modified_base 15: mod_base = OTHER; note = 2'-O-methyluridine-3'-phosphate
  modified_base 16: mod_base = OTHER; note = 2'-O-methyluridine-3'-phosphate
  modified_base 17: mod_base = OTHER; note = 2'-O-methylguanosine-3'-phosphate
  modified_base 18: mod_base = OTHER; note = 2'-O-methylcytidine-3'-phosphate
  modified_base 19: mod_base = OTHER; note = 2'-O-methyluridine-3'-phosphorothioate
  modified_base 20: mod_base = OTHER; note = 2'-O-methylguanosine-3'- phosphorothioate
  modified_base 21: mod_base = OTHER; note = 2'-O-methyladenosine-3'-phosphate
ttctgtgggctgcgttgctga

SEQ ID NO: 713 - RNA, 21 nt, synthetic construct
  source 1..21: mol_type = other RNA; note = Description of Artificial Sequence: Synthetic oligonucleotide
  modified_base 1: mod_base = OTHER; note = 2'-O-methylguanosine-3'- phosphorothioate
  modified_base 2: mod_base = OTHER; note = 2'-O-methylcytidine-3'- phosphorothioate
  modified_base 3: mod_base = OTHER; note = 2'-O-methylguanosine-3'-phosphate
  modified_base 4: mod_base = OTHER; note = 2'-O-methyluridine-3'-phosphate
  modified_base 5: mod_base = OTHER; note = 2'-O-methyluridine-3'-phosphate
  modified_base 6: mod_base = OTHER; note = 2'-O-hexadecyl-guanosine-3'-phosphate
  modified_base 7: mod_base = OTHER; note = 2'-fluorocytidine-3'-phosphate
  modified_base 8: mod_base = OTHER; note = 2'-O-methyluridine-3'-phosphate
  modified_base 9: mod_base = OTHER; note = 2'-fluoroguanosine-3'-phosphate
  modified_base 10: mod_base = OTHER; note = 2'-fluoroguanosine-3'-phosphate
  modified_base 11: mod_base = OTHER; note = 2'-fluorouridine-3'-phosphate
  modified_base 12: mod_base = OTHER; note = 2'-O-methylcytidine-3'-phosphate
  modified_base 13: mod_base = OTHER; note = 2'-O-methyladenosine-3'-phosphate
  modified_base 14: mod_base = OTHER; note = 2'-O-methylcytidine-3'-phosphate
  modified_base 15: mod_base = OTHER; note = 2'-O-methyladenosine-3'-phosphate
  modified_base 16: mod_base = OTHER; note = 2'-O-methyluridine-3'-phosphate
  modified_base 17: mod_base = OTHER; note = 2'-O-methyluridine-3'-phosphate
  modified_base 18: mod_base = OTHER; note = 2'-O-methylcytidine-3'-phosphate
  modified_base 19: mod_base = OTHER; note = 2'-O-methylcytidine-3'- phosphorothioate
  modified_base 20: mod_base = OTHER; note = 2'-O-methyluridine-3'-phosphorothioate
  modified_base 21: mod_base = OTHER; note = 2'-O-methyladenosine-3'-phosphate
gcgttgctggtcacattccta

SEQ ID NO: 714 - RNA, 21 nt, synthetic construct
  source 1..21: mol_type = other RNA; note = Description of Artificial Sequence: Synthetic oligonucleotide
  modified_base 1: mod_base = OTHER; note = 2'-O-methylcytidine-3'- phosphorothioate
  modified_base 2: mod_base = OTHER; note = 2'-O-methyladenosine-3'- phosphorothioate
  modified_base 3: mod_base = OTHER; note = 2'-O-methylcytidine-3'-phosphate
  modified_base 4: mod_base = OTHER; note = 2'-O-methyluridine-3'-phosphate
  modified_base 5: mod_base = OTHER; note = 2'-O-methylguanosine-3'-phosphate
  modified_base 6: mod_base = OTHER; note = 2'-O-hexadecyl-guanosine-3'-phosphate
  modified_base 7: mod_base = OTHER; note = 2'-fluoroguanosine-3'-phosphate
  modified_base 8: mod_base = OTHER; note = 2'-O-methyluridine-3'-phosphate
  modified_base 9: mod_base = OTHER; note = 2'-fluorocytidine-3'-phosphate
  modified_base 10: mod_base = OTHER; note = 2'-fluoroguanosine-3'-phosphate
  modified_base 11: mod_base = OTHER; note = 2'-fluorocytidine-3'-phosphate
  modified_base 12: mod_base = OTHER; note = 2'-O-methyluridine-3'-phosphate
  modified_base 13: mod_base = OTHER; note = 2'-O-methyluridine-3'-phosphate
  modified_base 14: mod_base = OTHER; note = 2'-O-methyluridine-3'-phosphate
  modified_base 15: mod_base = OTHER; note = 2'-O-methyluridine-3'-phosphate
  modified_base 16: mod_base = OTHER; note = 2'-O-methylguanosine-3'-phosphate
  modified_base 17: mod_base = OTHER; note = 2'-O-methylguanosine-3'-phosphate
  modified_base 18: mod_base = OTHER; note = 2'-O-methylguanosine-3'-phosphate
  modified_base 19: mod_base = OTHER; note = 2'-O-methyladenosine-3'- phosphorothioate
  modified_base 20: mod_base = OTHER; note = 2'-O-methyluridine-3'-phosphorothioate
  modified_base 21: mod_base = OTHER; note = 2'-O-methyladenosine-3'-phosphate
cactgggtcgcttttgggata

SEQ ID NO: 715 - RNA, 21 nt, synthetic construct
  source 1..21: mol_type = other RNA; note = Description of Artificial Sequence: Synthetic oligonucleotide
  modified_base 1: mod_base = OTHER; note = 2'-O-methylguanosine-3'- phosphorothioate
  modified_base 2: mod_base = OTHER; note = 2'-O-methyluridine-3'-phosphorothioate
  modified_base 3: mod_base = OTHER; note = 2'-O-methylcytidine-3'-phosphate
  modified_base 4: mod_base = OTHER; note = 2'-O-methylguanosine-3'-phosphate
  modified_base 5: mod_base = OTHER; note = 2'-O-methylcytidine-3'-phosphate
  modified_base 6: mod_base = OTHER; note = 2'-O-hexadecyl-uridine-3'-phosphate
  modified_base 7: mod_base = OTHER; note = 2'-fluorouridine-3'-phosphate
  modified_base 8: mod_base = OTHER; note = 2'-O-methyluridine-3'-phosphate
  modified_base 9: mod_base = OTHER; note = 2'-fluorouridine-3'-phosphate
  modified_base 10: mod_base = OTHER; note = 2'-fluoroguanosine-3'-phosphate
  modified_base 11: mod_base = OTHER; note = 2'-fluoroguanosine-3'-phosphate
  modified_base 12: mod_base = OTHER; note = 2'-O-methylguanosine-3'-phosphate
  modified_base 13: mod_base = OTHER; note = 2'-O-methyladenosine-3'-phosphate
  modified_base 14: mod_base = OTHER; note = 2'-O-methyluridine-3'-phosphate
  modified_base 15: mod_base = OTHER; note = 2'-O-methyluridine-3'-phosphate
  modified_base 16: mod_base = OTHER; note = 2'-O-methyladenosine-3'-phosphate
  modified_base 17: mod_base = OTHER; note = 2'-O-methylcytidine-3'-phosphate
  modified_base 18: mod_base = OTHER; note = 2'-O-methylcytidine-3'-phosphate
  modified_base 19: mod_base = OTHER; note = 2'-O-methyluridine-3'-phosphorothioate
  modified_base 20: mod_base = OTHER; note = 2'-O-methylguanosine-3'- phosphorothioate
  modified_base 21: mod_base = OTHER; note = 2'-O-methyladenosine-3'-phosphate
gtcgcttttgggattacctga

SEQ ID NO: 716 - RNA, 21 nt, synthetic construct
  source 1..21: mol_type = other RNA; note = Description of Artificial Sequence: Synthetic oligonucleotide
  modified_base 1: mod_base = OTHER; note = 2'-O-methyluridine-3'-phosphorothioate
  modified_base 2: mod_base = OTHER; note = 2'-O-methyluridine-3'-phosphorothioate
  modified_base 3: mod_base = OTHER; note = 2'-O-methyluridine-3'-phosphate
  modified_base 4: mod_base = OTHER; note = 2'-O-methyluridine-3'-phosphate
  modified_base 5: mod_base = OTHER; note = 2'-O-methylguanosine-3'-phosphate
  modified_base 6: mod_base = OTHER; note = 2'-O-hexadecyl-guanosine-3'-phosphate
  modified_base 7: mod_base = OTHER; note = 2'-fluoroguanosine-3'-phosphate
  modified_base 8: mod_base = OTHER; note = 2'-O-methyladenosine-3'-phosphate
  modified_base 9: mod_base = OTHER; note = 2'-fluorouridine-3'-phosphate
  modified_base 10: mod_base = OTHER; note = 2'-fluorouridine-3'-phosphate
  modified_base 11: mod_base = OTHER; note = 2'-fluoroadenosine-3'-phosphate
  modified_base 12: mod_base = OTHER; note = 2'-O-methylcytidine-3'-phosphate
  modified_base 13: mod_base = OTHER; note = 2'-O-methylcytidine-3'-phosphate
  modified_base 14: mod_base = OTHER; note = 2'-O-methyluridine-3'-phosphate
  modified_base 15: mod_base = OTHER; note = 2'-O-methylguanosine-3'-phosphate
  modified_base 16: mod_base = OTHER; note = 2'-O-methylcytidine-3'-phosphate
  modified_base 17: mod_base = OTHER; note = 2'-O-methylguanosine-3'-phosphate
  modified_base 18: mod_base = OTHER; note = 2'-O-methylcytidine-3'-phosphate
  modified_base 19: mod_base = OTHER; note = 2'-O-methyluridine-3'-phosphorothioate
  modified_base 20: mod_base = OTHER; note = 2'-O-methylguanosine-3'- phosphorothioate
  modified_base 21: mod_base = OTHER; note = 2'-O-methyladenosine-3'-phosphate
ttttgggattacctgcgctga

SEQ ID NO: 717 - RNA, 21 nt, synthetic construct
  source 1..21: mol_type = other RNA; note = Description of Artificial Sequence: Synthetic oligonucleotide
  modified_base 1: mod_base = OTHER; note = 2'-O-methylcytidine-3'- phosphorothioate
  modified_base 2: mod_base = OTHER; note = 2'-O-methylcytidine-3'- phosphorothioate
  modified_base 3: mod_base = OTHER; note = 2'-O-methylguanosine-3'-phosphate
  modified_base 4: mod_base = OTHER; note = 2'-O-methylcytidine-3'-phosphate
  modified_base 5: mod_base = OTHER; note = 2'-O-methylcytidine-3'-phosphate
  modified_base 6: mod_base = OTHER; note = 2'-O-hexadecyl-uridine-3'-phosphate
  modified_base 7: mod_base = OTHER; note = 2'-fluorocytidine-3'-phosphate
  modified_base 8: mod_base = OTHER; note = 2'-O-methyladenosine-3'-phosphate
  modified_base 9: mod_base = OTHER; note = 2'-fluoroadenosine-3'-phosphate
  modified_base 10: mod_base = OTHER; note = 2'-fluoroguanosine-3'-phosphate
  modified_base 11: mod_base = OTHER; note = 2'-fluoroadenosine-3'-phosphate
  modified_base 12: mod_base = OTHER; note = 2'-O-methylguanosine-3'-phosphate
  modified_base 13: mod_base = OTHER; note = 2'-O-methylcytidine-3'-phosphate
  modified_base 14: mod_base = OTHER; note = 2'-O-methyluridine-3'-phosphate
  modified_base 15: mod_base = OTHER; note = 2'-O-methylguanosine-3'-phosphate
  modified_base 16: mod_base = OTHER; note = 2'-O-methylguanosine-3'-phosphate
  modified_base 17: mod_base = OTHER; note = 2'-O-methyluridine-3'-phosphate
  modified_base 18: mod_base = OTHER; note = 2'-O-methyluridine-3'-phosphate
  modified_base 19: mod_base = OTHER; note = 2'-O-methylcytidine-3'- phosphorothioate
  modified_base 20: mod_base = OTHER; note = 2'-O-methylguanosine-3'- phosphorothioate
  modified_base 21: mod_base = OTHER; note = 2'-O-methyladenosine-3'-phosphate
ccgcctcaagagctggttcga

SEQ ID NO: 718 - RNA, 21 nt, synthetic construct
  source 1..21: mol_type = other RNA; note = Description of Artificial Sequence: Synthetic oligonucleotide
  modified_base 1: mod_base = OTHER; note = 2'-O-methylguanosine-3'- phosphorothioate
  modified_base 2: mod_base = OTHER; note = 2'-O-methyladenosine-3'- phosphorothioate
  modified_base 3: mod_base = OTHER; note = 2'-O-methylcytidine-3'-phosphate
  modified_base 4: mod_base = OTHER; note = 2'-O-methylcytidine-3'-phosphate
  modified_base 5: mod_base = OTHER; note = 2'-O-methylcytidine-3'-phosphate
  modified_base 6: mod_base = OTHER; note = 2'-O-hexadecyl-uridine-3'-phosphate
  modified_base 7: mod_base = OTHER; note = 2'-fluoroadenosine-3'-phosphate
  modified_base 8: mod_base = OTHER; note = 2'-O-methylguanosine-3'-phosphate
  modified_base 9: mod_base = OTHER; note = 2'-fluorouridine-3'-phosphate
  modified_base 10: mod_base = OTHER; note = 2'-fluorouridine-3'-phosphate
  modified_base 11: mod_base = OTHER; note = 2'-fluorouridine-3'-phosphate
  modified_base 12: mod_base = OTHER; note = 2'-O-methyladenosine-3'-phosphate
  modified_base 13: mod_base = OTHER; note = 2'-O-methyladenosine-3'-phosphate
  modified_base 14: mod_base = OTHER; note = 2'-O-methyluridine-3'-phosphate
  modified_base 15: mod_base = OTHER; note = 2'-O-methyladenosine-3'-phosphate
  modified_base 16: mod_base = OTHER; note = 2'-O-methyladenosine-3'-phosphate
  modified_base 17: mod_base = OTHER; note = 2'-O-methyladenosine-3'-phosphate
  modified_base 18: mod_base = OTHER; note = 2'-O-methylguanosine-3'-phosphate
  modified_base 19: mod_base = OTHER; note = 2'-O-methyladenosine-3'- phosphorothioate
  modified_base 20: mod_base = OTHER; note = 2'-O-methyluridine-3'-phosphorothioate
  modified_base 21: mod_base = OTHER; note = 2'-O-methyladenosine-3'-phosphate
gaccctagtttaataaagata

SEQ ID NO: 719 - RNA, 21 nt, synthetic construct
  source 1..21: mol_type = other RNA; note = Description of Artificial Sequence: Synthetic oligonucleotide
  modified_base 1: mod_base = OTHER; note = 2'-O-methylcytidine-3'- phosphorothioate
  modified_base 2: mod_base = OTHER; note = 2'-O-methylguanosine-3'- phosphorothioate
  modified_base 3: mod_base = OTHER; note = 2'-O-methylguanosine-3'-phosphate
  modified_base 4: mod_base = OTHER; note = 2'-O-methylcytidine-3'-phosphate
  modified_base 5: mod_base = OTHER; note = 2'-O-methylcytidine-3'-phosphate
  modified_base 6: mod_base = OTHER; note = 2'-O-hexadecyl-uridine-3'-phosphate
  modified_base 7: mod_base = OTHER; note = 2'-fluorocytidine-3'-phosphate
  modified_base 8: mod_base = OTHER; note = 2'-O-methyladenosine-3'-phosphate
  modified_base 9: mod_base = OTHER; note = 2'-fluoroguanosine-3'-phosphate
  modified_base 10: mod_base = OTHER; note = 2'-fluorocytidine-3'-phosphate
  modified_base 11: mod_base = OTHER; note = 2'-fluoroguanosine-3'-phosphate
  modified_base 12: mod_base = OTHER; note = 2'-O-methylcytidine-3'-phosphate
  modified_base 13: mod_base = OTHER; note = 2'-O-methylcytidine-3'-phosphate
  modified_base 14: mod_base = OTHER; note = 2'-O-methyladenosine-3'-phosphate
  modified_base 15: mod_base = OTHER; note = 2'-O-methyluridine-3'-phosphate
  modified_base 16: mod_base = OTHER; note = 2'-O-methylcytidine-3'-phosphate
  modified_base 17: mod_base = OTHER; note = 2'-O-methylcytidine-3'-phosphate
  modified_base 18: mod_base = OTHER; note = 2'-O-methylguanosine-3'-phosphate
  modified_base 19: mod_base = OTHER; note = 2'-O-methylcytidine-3'- phosphorothioate
  modified_base 20: mod_base = OTHER; note = 2'-O-methylguanosine-3'- phosphorothioate
  modified_base 21: mod_base = OTHER; note = 2'-O-methyladenosine-3'-phosphate
cggcctcagcgccatccgcga

SEQ ID NO: 720 - RNA, 23 nt, synthetic construct
  source 1..23: mol_type = other RNA; note = Description of Artificial Sequence: Synthetic oligonucleotide
  modified_base 1: mod_base = OTHER; note = Vinyl-phosphonate 2'-O-methyluridine-3'-phosphorothioate
  modified_base 2: mod_base = OTHER; note = 2'-fluoroadenosine-3'-phosphorothioate
  modified_base 3: mod_base = OTHER; note = 2'-O-methyladenosine-3'-phosphate
  modified_base 4: mod_base = OTHER; note = 2'-O-methylcytidine-3'-phosphate
  modified_base 5: mod_base = OTHER; note = 2'-O-methylcytidine-3'-phosphate
  modified_base 6: mod_base = OTHER; note = 2'-fluorouridine-3'-phosphate
  modified_base 7: mod_base = OTHER; note = 2'-O-methyluridine-3'-phosphate
  modified_base 8: mod_base = OTHER; note = 2'-fluorocytidine-3'-phosphate
  modified_base 9: mod_base = OTHER; note = 2'-fluoroadenosine-3'-phosphate
  modified_base 10: mod_base = OTHER; note = 2'-O-methyluridine-3'-phosphate
  modified_base 11: mod_base = OTHER; note = 2'-O-methylcytidine-3'-phosphate
  modified_base 12: mod_base = OTHER; note = 2'-O-methyluridine-3'-phosphate
  modified_base 13: mod_base = OTHER; note = 2'-O-methyluridine-3'-phosphate
  modified_base 14: mod_base = OTHER; note = 2'-fluorocytidine-3'-phosphate
  modified_base 15: mod_base = OTHER; note = 2'-O-methylcytidine-3'-phosphate
  modified_base 16: mod_base = OTHER; note = 2'-fluorouridine-3'-phosphate
  modified_base 17: mod_base = OTHER; note = 2'-O-methylguanosine-3'-phosphate
  modified_base 18: mod_base = OTHER; note = 2'-O-methylcytidine-3'-phosphate
  modified_base 19: mod_base = OTHER; note = 2'-O-methylcytidine-3'-phosphate
  modified_base 20: mod_base = OTHER; note = 2'-O-methyluridine-3'-phosphate
  modified_base 21: mod_base = OTHER; note = 2'-O-methylguanosine-3'- phosphorothioate
  modified_base 22: mod_base = OTHER; note = 2'-O-methyluridine-3'-phosphorothioate
  modified_base 23: mod_base = OTHER; note = 2'-O-methylguanosine-3'-phosphate
taaccttcatcttcctgcctgtg

SEQ ID NO: 721 - RNA, 23 nt, synthetic construct
  source 1..23: mol_type = other RNA; note = Description of Artificial Sequence: Synthetic oligonucleotide
  modified_base 1: mod_base = OTHER; note = Vinyl-phosphonate 2'-O-methyluridine-3'-phosphorothioate
  modified_base 2: mod_base = OTHER; note = 2'-fluorocytidine-3'-phosphorothioate
  modified_base 3: mod_base = OTHER; note = 2'-O-methyladenosine-3'-phosphate
  modified_base 4: mod_base = OTHER; note = 2'-O-methylcytidine-3'-phosphate
  modified_base 5: mod_base = OTHER; note = 2'-O-methyladenosine-3'-phosphate
  modified_base 6: mod_base = OTHER; note = 2'-fluoroguanosine-3'-phosphate
  modified_base 7: mod_base = OTHER; note = 2'-O-methyladenosine-3'-phosphate
  modified_base 8: mod_base = OTHER; note = 2'-fluoroadenosine-3'-phosphate
  modified_base 9: mod_base = OTHER; note = 2'-fluorocytidine-3'-phosphate
  modified_base 10: mod_base = OTHER; note = 2'-O-methylcytidine-3'-phosphate
  modified_base 11: mod_base = OTHER; note = 2'-O-methyluridine-3'-phosphate
  modified_base 12: mod_base = OTHER; note = 2'-O-methyluridine-3'-phosphate
  modified_base 13: mod_base = OTHER; note = 2'-O-methylcytidine-3'-phosphate
  modified_base 14: mod_base = OTHER; note = 2'-fluoroadenosine-3'-phosphate
  modified_base 15: mod_base = OTHER; note = 2'-O-methyluridine-3'-phosphate
  modified_base 16: mod_base = OTHER; note = 2'-fluorocytidine-3'-phosphate
  modified_base 17: mod_base = OTHER; note = 2'-O-methyluridine-3'-phosphate
  modified_base 18: mod_base = OTHER; note = 2'-O-methyluridine-3'-phosphate
  modified_base 19: mod_base = OTHER; note = 2'-O-methylcytidine-3'-phosphate
  modified_base 20: mod_base = OTHER; note = 2'-O-methylcytidine-3'-phosphate
  modified_base 21: mod_base = OTHER; note = 2'-O-methyluridine-3'-phosphorothioate
  modified_base 22: mod_base = OTHER; note = 2'-O-methylguanosine-3'- phosphorothioate
  modified_base 23: mod_base = OTHER; note = 2'-O-methylcytidine-3'-phosphate
tcacagaaccttcatcttcctgc

SEQ ID NO: 722 - RNA, 23 nt, synthetic construct
  source 1..23: mol_type = other RNA; note = Description of Artificial Sequence: Synthetic oligonucleotide
  modified_base 1: mod_base = OTHER; note = Vinyl-phosphonate 2'-O-methyluridine-3'-phosphorothioate
  modified_base 2: mod_base = OTHER; note = 2'-fluorocytidine-3'-phosphorothioate
  modified_base 3: mod_base = OTHER; note = 2'-O-methyladenosine-3'-phosphate
  modified_base 4: mod_base = OTHER; note = 2'-O-methylguanosine-3'-phosphate
  modified_base 5: mod_base = OTHER; note = 2'-O-methylcytidine-3'-phosphate
  modified_base 6: mod_base = OTHER; note = 2'-fluoroadenosine-3'-phosphate
  modified_base 7: mod_base = OTHER; note = 2'-O-methyladenosine-3'-phosphate
  modified_base 8: mod_base = OTHER; note = 2'-fluorocytidine-3'-phosphate
  modified_base 9: mod_base = OTHER; note = 2'-fluoroguanosine-3'-phosphate
  modified_base 10: mod_base = OTHER; note = 2'-O-methylcytidine-3'-phosphate
  modified_base 11: mod_base = OTHER; note = 2'-O-methyladenosine-3'-phosphate
  modified_base 12: mod_base = OTHER; note = 2'-O-methylguanosine-3'-phosphate
  modified_base 13: mod_base = OTHER; note = 2'-O-methylcytidine-3'-phosphate
  modified_base 14: mod_base = OTHER; note = 2'-fluorocytidine-3'-phosphate
  modified_base 15: mod_base = OTHER; note = 2'-O-methylcytidine-3'-phosphate
  modified_base 16: mod_base = OTHER; note = 2'-fluoroadenosine-3'-phosphate
  modified_base 17: mod_base = OTHER; note = 2'-O-methylcytidine-3'-phosphate
  modified_base 18: mod_base = OTHER; note = 2'-O-methyladenosine-3'-phosphate
  modified_base 19: mod_base = OTHER; note = 2'-O-methylguanosine-3'-phosphate
  modified_base 20: mod_base = OTHER; note = 2'-O-methyladenosine-3'-phosphate
  modified_base 21: mod_base = OTHER; note = 2'-O-methyladenosine-3'- phosphorothioate
  modified_base 22: mod_base = OTHER; note = 2'-O-methylcytidine-3'- phosphorothioate
  modified_base 23: mod_base = OTHER; note = 2'-O-methylcytidine-3'-phosphate
tcagcaacgcagcccacagaacc

SEQ ID NO: 723 - RNA, 23 nt, synthetic construct
  source 1..23: mol_type = other RNA; note = Description of Artificial Sequence: Synthetic oligonucleotide
  modified_base 1: mod_base = OTHER; note = Vinyl-phosphonate 2'-O-methyluridine-3'-phosphorothioate
  modified_base 2: mod_base = OTHER; note = 2'-fluoroadenosine-3'-phosphorothioate
  modified_base 3: mod_base = OTHER; note = 2'-O-methylguanosine-3'-phosphate
  modified_base 4: mod_base = OTHER; note = 2'-O-methylguanosine-3'-phosphate
  modified_base 5: mod_base = OTHER; note = 2'-O-methyladenosine-3'-phosphate
  modified_base 6: mod_base = OTHER; note = 2'-fluoroadenosine-3'-phosphate
  modified_base 7: mod_base = OTHER; note = 2'-O-methyluridine-3'-phosphate
  modified_base 8: mod_base = OTHER; note = 2'-fluoroguanosine-3'-phosphate
  modified_base 9: mod_base = OTHER; note = 2'-fluorouridine-3'-phosphate
  modified_base 10: mod_base = OTHER; note = 2'-O-methylguanosine-3'-phosphate
  modified_base 11: mod_base = OTHER; note = 2'-O-methyladenosine-3'-phosphate
  modified_base 12: mod_base = OTHER; note = 2'-O-methylcytidine-3'-phosphate
  modified_base 13: mod_base = OTHER; note = 2'-O-methylcytidine-3'-phosphate
  modified_base 14: mod_base = OTHER; note = 2'-fluoroadenosine-3'-phosphate
  modified_base 15: mod_base = OTHER; note = 2'-O-methylguanosine-3'-phosphate
  modified_base 16: mod_base = OTHER; note = 2'-fluorocytidine-3'-phosphate
  modified_base 17: mod_base = OTHER; note = 2'-O-methyladenosine-3'-phosphate
  modified_base 18: mod_base = OTHER; note = 2'-O-methyladenosine-3'-phosphate
  modified_base 19: mod_base = OTHER; note = 2'-O-methylcytidine-3'-phosphate
  modified_base 20: mod_base = OTHER; note = 2'-O-methylguanosine-3'-phosphate
  modified_base 21: mod_base = OTHER; note = 2'-O-methylcytidine-3'- phosphorothioate
  modified_base 22: mod_base = OTHER; note = 2'-O-methyladenosine-3'- phosphorothioate
  modified_base 23: mod_base = OTHER; note = 2'-O-methylguanosine-3'-phosphate
taggaatgtgaccagcaacgcag

SEQ ID NO: 724 - RNA, 23 nt, synthetic construct
  source 1..23: mol_type = other RNA; note = Description of Artificial Sequence: Synthetic oligonucleotide
  modified_base 1: mod_base = OTHER; note = Vinyl-phosphonate 2'-O-methyluridine-3'-phosphorothioate
  modified_base 2: mod_base = OTHER; note = 2'-fluoroadenosine-3'-phosphorothioate
  modified_base 3: mod_base = OTHER; note = 2'-O-methyluridine-3'-phosphate
  modified_base 4: mod_base = OTHER; note = 2'-O-methylcytidine-3'-phosphate
  modified_base 5: mod_base = OTHER; note = 2'-O-methylcytidine-3'-phosphate
  modified_base 6: mod_base = OTHER; note = 2'-fluorocytidine-3'-phosphate
  modified_base 7: mod_base = OTHER; note = 2'-O-methyladenosine-3'-phosphate
  modified_base 8: mod_base = OTHER; note = 2'-fluoroadenosine-3'-phosphate
  modified_base 9: mod_base = OTHER; note = 2'-fluoroadenosine-3'-phosphate
  modified_base 10: mod_base = OTHER; note = 2'-O-methyladenosine-3'-phosphate
  modified_base 11: mod_base = OTHER; note = 2'-O-methylguanosine-3'-phosphate
  modified_base 12: mod_base = OTHER; note = 2'-O-methylcytidine-3'-phosphate
  modified_base 13: mod_base = OTHER; note = 2'-O-methylguanosine-3'-phosphate
  modified_base 14: mod_base = OTHER; note = 2'-fluoroadenosine-3'-phosphate
  modified_base 15: mod_base = OTHER; note = 2'-O-methylcytidine-3'-phosphate
  modified_base 16: mod_base = OTHER; note = 2'-fluorocytidine-3'-phosphate
  modified_base 17: mod_base = OTHER; note = 2'-O-methylcytidine-3'-phosphate
  modified_base 18: mod_base = OTHER; note = 2'-O-methyladenosine-3'-phosphate
  modified_base 19: mod_base = OTHER; note = 2'-O-methylguanosine-3'-phosphate
  modified_base 20: mod_base = OTHER; note = 2'-O-methyluridine-3'-phosphate
  modified_base 21: mod_base = OTHER; note = 2'-O-methylguanosine-3'- phosphorothioate
  modified_base 22: mod_base = OTHER; note = 2'-O-methylcytidine-3'- phosphorothioate
  modified_base 23: mod_base = OTHER; note = 2'-O-methylcytidine-3'-phosphate
tatcccaaaagcgacccagtgcc

SEQ ID NO: 725 - RNA, 23 nt, synthetic construct
  source 1..23: mol_type = other RNA; note = Description of Artificial Sequence: Synthetic oligonucleotide
  modified_base 1: mod_base = OTHER; note = Vinyl-phosphonate 2'-O-methyluridine-3'-phosphorothioate
  modified_base 2: mod_base = OTHER; note = 2'-fluorocytidine-3'-phosphorothioate
  modified_base 3: mod_base = OTHER; note = 2'-O-methyladenosine-3'-phosphate
  modified_base 4: mod_base = OTHER; note = 2'-O-methylguanosine-3'-phosphate
  modified_base 5: mod_base = OTHER; note = 2'-O-methylguanosine-3'-phosphate
  modified_base 6: mod_base = OTHER; note = 2'-fluorouridine-3'-phosphate
  modified_base 7: mod_base = OTHER; note = 2'-O-methyladenosine-3'-phosphate
  modified_base 8: mod_base = OTHER; note = 2'-fluoroadenosine-3'-phosphate
  modified_base 9: mod_base = OTHER; note = 2'-fluorouridine-3'-phosphate
  modified_base 10: mod_base = OTHER; note = 2'-O-methylcytidine-3'-phosphate
  modified_base 11: mod_base = OTHER; note = 2'-O-methylcytidine-3'-phosphate
  modified_base 12: mod_base = OTHER; note = 2'-O-methylcytidine-3'-phosphate
  modified_base 13: mod_base = OTHER; note = 2'-O-methyladenosine-3'-phosphate
  modified_base 14: mod_base = OTHER; note = 2'-fluoroadenosine-3'-phosphate
  modified_base 15: mod_base = OTHER; note = 2'-O-methyladenosine-3'-phosphate
  modified_base 16: mod_base = OTHER; note = 2'-fluoroadenosine-3'-phosphate
  modified_base 17: mod_base = OTHER; note = 2'-O-methylguanosine-3'-phosphate
  modified_base 18: mod_base = OTHER; note = 2'-O-methylcytidine-3'-phosphate
  modified_base 19: mod_base = OTHER; note = 2'-O-methylguanosine-3'-phosphate
  modified_base 20: mod_base = OTHER; note = 2'-O-methyladenosine-3'-phosphate
  modified_base 21: mod_base = OTHER; note = 2'-O-methylcytidine-3'- phosphorothioate
  modified_base 22: mod_base = OTHER; note = 2'-O-methylcytidine-3'- phosphorothioate
  modified_base 23: mod_base = OTHER; note = 2'-O-methylcytidine-3'-phosphate
tcaggtaatcccaaaagcgaccc

SEQ ID NO: 726 - RNA, 23 nt, synthetic construct
  source 1..23: mol_type = other RNA; note = Description of Artificial Sequence: Synthetic oligonucleotide
  modified_base 1: mod_base = OTHER; note = Vinyl-phosphonate 2'-O-methyluridine-3'-phosphorothioate
  modified_base 2: mod_base = OTHER; note = 2'-fluorocytidine-3'-phosphorothioate
  modified_base 3: mod_base = OTHER; note = 2'-O-methyladenosine-3'-phosphate
  modified_base 4: mod_base = OTHER; note = 2'-O-methylguanosine-3'-phosphate
  modified_base 5: mod_base = OTHER; note = 2'-O-methylcytidine-3'-phosphate
  modified_base 6: mod_base = OTHER; note = 2'-fluoroguanosine-3'-phosphate
  modified_base 7: mod_base = OTHER; note = 2'-O-methylcytidine-3'-phosphate
  modified_base 8: mod_base = OTHER; note = 2'-fluoroadenosine-3'-phosphate
  modified_base 9: mod_base = OTHER; note = 2'-fluoroguanosine-3'-phosphate
  modified_base 10: mod_base = OTHER; note = 2'-O-methylguanosine-3'-phosphate
  modified_base 11: mod_base = OTHER; note = 2'-O-methyluridine-3'-phosphate
  modified_base 12: mod_base = OTHER; note = 2'-O-methyladenosine-3'-phosphate
  modified_base 13: mod_base = OTHER; note = 2'-O-methyladenosine-3'-phosphate
  modified_base 14: mod_base = OTHER; note = 2'-fluorouridine-3'-phosphate
  modified_base 15: mod_base = OTHER; note = 2'-O-methylcytidine-3'-phosphate
  modified_base 16: mod_base = OTHER; note = 2'-fluorocytidine-3'-phosphate
  modified_base 17: mod_base = OTHER; note = 2'-O-methylcytidine-3'-phosphate
  modified_base 18: mod_base = OTHER; note = 2'-O-methyladenosine-3'-phosphate
  modified_base 19: mod_base = OTHER; note = 2'-O-methyladenosine-3'-phosphate
  modified_base 20: mod_base = OTHER; note = 2'-O-methyladenosine-3'-phosphate
  modified_base 21: mod_base = OTHER; note = 2'-O-methyladenosine-3'- phosphorothioate
  modified_base 22: mod_base = OTHER; note = 2'-O-methylguanosine-3'- phosphorothioate
  modified_base 23: mod_base = OTHER; note = 2'-O-methylcytidine-3'-phosphate
tcagcgcaggtaatcccaaaagc

SEQ ID NO: 727 - RNA, 23 nt, synthetic construct
  source 1..23: mol_type = other RNA; note = Description of Artificial Sequence: Synthetic oligonucleotide
  modified_base 1: mod_base = OTHER; note = Vinyl-phosphonate 2'-O-methyluridine-3'-phosphorothioate
  modified_base 2: mod_base = OTHER; note = 2'-fluorocytidine-3'-phosphorothioate
  modified_base 3: mod_base = OTHER; note = 2'-O-methylguanosine-3'-phosphate
  modified_base 4: mod_base = OTHER; note = 2'-O-methyladenosine-3'-phosphate
  modified_base 5: mod_base = OTHER; note = 2'-O-methyladenosine-3'-phosphate
  modified_base 6: mod_base = OTHER; note = 2'-fluorocytidine-3'-phosphate
  modified_base 7: mod_base = OTHER; note = 2'-O-methylcytidine-3'-phosphate
  modified_base 8: mod_base = OTHER; note = 2'-fluoroadenosine-3'-phosphate
  modified_base 9: mod_base = OTHER; note = 2'-fluoroguanosine-3'-phosphate
  modified_base 10: mod_base = OTHER; note = 2'-O-methylcytidine-3'-phosphate
  modified_base 11: mod_base = OTHER; note = 2'-O-methyluridine-3'-phosphate
  modified_base 12: mod_base = OTHER; note = 2'-O-methylcytidine-3'-phosphate
  modified_base 13: mod_base = OTHER; note = 2'-O-methyluridine-3'-phosphate
  modified_base 14: mod_base = OTHER; note = 2'-fluorouridine-3'-phosphate
  modified_base 15: mod_base = OTHER; note = 2'-O-methylguanosine-3'-phosphate
  modified_base 16: mod_base = OTHER; note = 2'-fluoroadenosine-3'-phosphate
  modified_base 17: mod_base = OTHER; note = 2'-O-methylguanosine-3'-phosphate
  modified_base 18: mod_base = OTHER; note = 2'-O-methylguanosine-3'-phosphate
  modified_base 19: mod_base = OTHER; note = 2'-O-methylcytidine-3'-phosphate
  modified_base 20: mod_base = OTHER; note = 2'-O-methylguanosine-3'-phosphate
  modified_base 21: mod_base = OTHER; note = 2'-O-methylguanosine-3'- phosphorothioate
  modified_base 22: mod_base = OTHER; note = 2'-O-methylguanosine-3'- phosphorothioate
  modified_base 23: mod_base = OTHER; note = 2'-O-methylcytidine-3'-phosphate
tcgaaccagctcttgaggcgggc

SEQ ID NO: 728 - RNA, 23 nt, synthetic construct
  source 1..23: mol_type = other RNA; note = Description of Artificial Sequence: Synthetic oligonucleotide
  modified_base 1: mod_base = OTHER; note = Vinyl-phosphonate 2'-O-methyluridine-3'-phosphorothioate
  modified_base 2: mod_base = OTHER; note = 2'-fluoroadenosine-3'-phosphorothioate
  modified_base 3: mod_base = OTHER; note = 2'-O-methyluridine-3'-phosphate
  modified_base 4: mod_base = OTHER; note = 2'-O-methylcytidine-3'-phosphate
  modified_base 5: mod_base = OTHER; note = 2'-O-methyluridine-3'-phosphate
  modified_base 6: mod_base = OTHER; note = 2'-fluorouridine-3'-phosphate
  modified_base 7: mod_base = OTHER; note = 2'-O-methyluridine-3'-phosphate
  modified_base 8: mod_base = OTHER; note = 2'-fluoroadenosine-3'-phosphate
  modified_base 9: mod_base = OTHER; note = 2'-fluorouridine-3'-phosphate
  modified_base 10: mod_base = OTHER; note = 2'-O-methyluridine-3'-phosphate
  modified_base 11: mod_base = OTHER; note = 2'-O-methyladenosine-3'-phosphate
  modified_base 12: mod_base = OTHER; note = 2'-O-methyladenosine-3'-phosphate
  modified_base 13: mod_base = OTHER; note = 2'-O-methyladenosine-3'-phosphate
  modified_base 14: mod_base = OTHER; note = 2'-fluorocytidine-3'-phosphate
  modified_base 15: mod_base = OTHER; note = 2'-O-methyluridine-3'-phosphate
  modified_base 16: mod_base = OTHER; note = 2'-fluoroadenosine-3'-phosphate
  modified_base 17: mod_base = OTHER; note = 2'-O-methylguanosine-3'-phosphate
  modified_base 18: mod_base = OTHER; note = 2'-O-methylguanosine-3'-phosphate
  modified_base 19: mod_base = OTHER; note = 2'-O-methylguanosine-3'-phosphate
  modified_base 20: mod_base = OTHER; note = 2'-O-methyluridine-3'-phosphate
  modified_base 21: mod_base = OTHER; note = 2'-O-methylcytidine-3'- phosphorothioate
  modified_base 22: mod_base = OTHER; note = 2'-O-methylcytidine-3'- phosphorothioate
  modified_base 23: mod_base = OTHER; note = 2'-O-methyladenosine-3'-phosphate
tatctttattaaactagggtcca

SEQ ID NO: 729 - RNA, 23 nt, synthetic construct
  source 1..23: mol_type = other RNA; note = Description of Artificial Sequence: Synthetic oligonucleotide
  modified_base 1: mod_base = OTHER; note = Vinyl-phosphonate 2'-O-methyluridine-3'-phosphorothioate
  modified_base 2: mod_base = OTHER; note = 2'-fluorocytidine-3'-phosphorothioate
  modified_base 3: mod_base = OTHER; note = 2'-O-methylguanosine-3'-phosphate
  modified_base 4: mod_base = OTHER; note = 2'-O-methylcytidine-3'-phosphate
  modified_base 5: mod_base = OTHER; note = 2'-O-methylguanosine-3'-phosphate
  modified_base 6: mod_base = OTHER; note = 2'-fluoroguanosine-3'-phosphate
  modified_base 7: mod_base = OTHER; note = 2'-O-methyladenosine-3'-phosphate
  modified_base 8: mod_base = OTHER; note = 2'-fluorouridine-3'-phosphate
  modified_base 9: mod_base = OTHER; note = 2'-fluoroguanosine-3'-phosphate
  modified_base 10: mod_base = OTHER; note = 2'-O-methylguanosine-3'-phosphate
  modified_base 11: mod_base = OTHER; note = 2'-O-methylcytidine-3'-phosphate
  modified_base 12: mod_base = OTHER; note = 2'-O-methylguanosine-3'-phosphate
  modified_base 13: mod_base = OTHER; note = 2'-O-methylcytidine-3'-phosphate
  modified_base 14: mod_base = OTHER; note = 2'-fluorouridine-3'-phosphate
  modified_base 15: mod_base = OTHER; note = 2'-O-methylguanosine-3'-phosphate
  modified_base 16: mod_base = OTHER; note = 2'-fluoroadenosine-3'-phosphate
  modified_base 17: mod_base = OTHER; note = 2'-O-methylguanosine-3'-phosphate
  modified_base 18: mod_base = OTHER; note = 2'-O-methylguanosine-3'-phosphate
  modified_base 19: mod_base = OTHER; note = 2'-O-methylcytidine-3'-phosphate
  modified_base 20: mod_base = OTHER; note = 2'-O-methylcytidine-3'-phosphate
  modified_base 21: mod_base = OTHER; note = 2'-O-methylguanosine-3'- phosphorothioate
  modified_base 22: mod_base = OTHER; note = 2'-O-methylcytidine-3'- phosphorothioate
  modified_base 23: mod_base = OTHER; note = 2'-O-methylguanosine-3'-phosphate
tcgcggatggcgctgaggccgcg

SEQ ID NO: 730 - RNA, 23 nt, unidentified
  source 1..23: mol_type = unassigned RNA; note = Description of Unknown: Target sequence
cacaggcaggaagatgaaggttc

SEQ ID NO: 731 - RNA, 23 nt, unidentified
  source 1..23: mol_type = unassigned RNA; note = Description of Unknown: Target sequence
gcaggaagatgaaggttctgtgg

SEQ ID NO: 732 - RNA, 23 nt, unidentified
  source 1..23: mol_type = unassigned RNA; note = Description of Unknown: Target sequence
ggttctgtgggctgcgttgctgg

SEQ ID NO: 733 - RNA, 23 nt, unidentified
  source 1..23: mol_type = unassigned RNA; note = Description of Unknown: Target sequence
ctgcgttgctggtcacattcctg

SEQ ID NO: 734 - RNA, 23 nt, unidentified
  source 1..23: mol_type = unassigned RNA; note = Description of Unknown: Target sequence
ggcactgggtcgcttttgggatt

SEQ ID NO: 735 - RNA, 23 nt, unidentified
  source 1..23: mol_type = unassigned RNA; note = Description of Unknown: Target sequence
gggtcgcttttgggattacctgc

SEQ ID NO: 736 - RNA, 23 nt, unidentified
  source 1..23: mol_type = unassigned RNA; note = Description of Unknown: Target sequence
gcttttgggattacctgcgctgg

SEQ ID NO: 737 - RNA, 23 nt, unidentified
  source 1..23: mol_type = unassigned RNA; note = Description of Unknown: Target sequence
gcccgcctcaagagctggttcga

SEQ ID NO: 738 - RNA, 23 nt, unidentified
  source 1..23: mol_type = unassigned RNA; note = Description of Unknown: Target sequence
tggaccctagtttaataaagatt

SEQ ID NO: 739 - RNA, 23 nt, unidentified
  source 1..23: mol_type = unassigned RNA; note = Description of Unknown: Target sequence
cgcggcctcagcgccatccgcga

1. A double stranded ribonucleic acid (dsRNA) agent for inhibiting expression of APOE, wherein the dsRNA agent comprises a sense strand and an antisense strand forming a double stranded region, wherein the sense strand comprises a nucleotide sequence comprising at least 15 contiguous nucleotides, with 0 or 1 mismatches, of a portion of the nucleotide sequence of SEQ ID NO:1, or a nucleotide sequence having at least 90% nucleotide sequence identity to the entire nucleotide sequence of SEQ ID NO:1, and the antisense strand comprises a nucleotide sequence comprising at least 15 contiguous nucleotides, with 0 or 1 mismatches, of the corresponding portion of the nucleotide sequence of SEQ ID NO:2, or a nucleotide sequence having at least 90% nucleotide sequence identity to the entire nucleotide sequence of SEQ ID NO:2, such that the sense strand is complementary to the at least 15 contiguous nucleotides in the antisense strand.

2.-4. (canceled)

5. The dsRNA agent of claim 1, wherein the sense strand and/or the antisense strand is a sense strand and/or an antisense strand selected from the group consisting of any of the sense strands and antisense strands in any one of Tables 2-5 and 7-10.

6. The dsRNA agent of claim 1, wherein the sense strand comprises at least 15 contiguous nucleotides differing by no more than 3 nucleotides from any one of the nucleotide sequences of nucleotides 57-79, 62-84, 75-97, 86-108, 207-229, 213-235, 218-240, 898-920, 1128-1150, 637-659 of SEQ ID NO: 1, and the antisense strand comprises at least 15 contiguous nucleotides from the corresponding nucleotide sequence of SEQ ID NO: 2.

7.-11. (canceled)

12. The dsRNA agent of claim 1, wherein the sense strand, the antisense strand, or both the sense strand and the antisense strand is conjugated to one or more lipophilic moieties.

13-19. (canceled)

20. The dsRNA agent of claim 1, wherein all of the nucleotides of the sense strand and all of the nucleotides of the antisense strand comprise a nucleotide modification.

21.-24. (canceled)

25. The dsRNA agent of claim 1, further comprising at least one phosphorothioate internucleotide linkage.

26. (canceled)

27. The dsRNA agent of claim 1, wherein each strand is no more than 30 nucleotides in length.

28.-38. (canceled)

39. The dsRNA agent of claim 12, wherein one or more lipophilic moieties are conjugated to one or more internal positions on at least one strand.

40.-48. (canceled)

49. The dsRNA agent of claim 12, wherein the one or more lipophilic moieties are conjugated to one or more of the internal positions selected from the group consisting of positions 4-8 and 13-18 on the sense strand, and positions 6-10 and 15-18 on the antisense strand, counting from the 5′end of each strand.

50.-56. (canceled)

57. The dsRNA agent of claim 12, wherein the lipophilic moiety is an aliphatic, alicyclic, or polyalicyclic compound.

58. (canceled)

59. (canceled)

60. The dsRNA agent of claim 57, wherein the lipophilic moiety contains a saturated or unsaturated C6-C18 hydrocarbon chain.

61.-75. (canceled)

76. The dsRNA agent of claim 1, further comprising a phosphate or phosphate mimic at the 5′-end of the antisense strand.

77.-79. (canceled)

80. An isolated cell containing the dsRNA agent of claim 1.

81. A pharmaceutical composition for inhibiting expression of a gene encoding APOE, comprising the dsRNA agent of claim 1.

82. (canceled)

83. A method of inhibiting expression of an APOE gene in a cell, the method comprising:
(a) contacting the cell with the dsRNA agent of claim 1, or the pharmaceutical composition of claim 81; and
(b) maintaining the cell produced in step (a) for a time sufficient to obtain degradation of the mRNA transcript of the APOE gene, thereby inhibiting expression of the APOE gene in the cell.

84.-94. (canceled)

95. A method of treating a subject diagnosed with an APOE-associated neurodegenerative disease, the method comprising administering to the subject a therapeutically effective amount of the dsRNA agent of claim 1 or the pharmaceutical composition of claim 81, thereby treating the subject.

96. The method of claim 95, wherein the subject is human.

97.-99. (canceled)

100. The method of claim 95, wherein the APOE-associated neurodegenerative disease is an amyloid-β-mediated disease.

101. (canceled)

102. The method of claim 95, wherein the APOE-associated neurodegenerative disease is a tau-mediated disease.

103.-114. (canceled)

115. The method of claim 95, wherein the dsRNA agent is administered to the subject at a dose of about 0.01 mg/kg to about 50 mg/kg.

116. The method of claim 95, wherein the dsRNA agent is administered to the subject intrathecally.

117.-123. (canceled)
